United States Patent Application Publication US 2021/0254182 A1 - sequence listing, part 4

SEQ ID NO: 91 - DNA, 7609242 bp, Phytopthora sojae (residues 5,706,934-7,609,242 of 7,609,242)
  misc_feature (40911)..(42413): n is a, c, g, or t
  misc_feature (44154)..(44253): n is a, c, g, or t
  misc_feature (1018625)..(1034984): n is a, c, g, or t
  misc_feature (1036211)..(1039539): n is a, c, g, or t
  misc_feature (1043630)..(1045157): n is a, c, g, or t
  misc_feature (1052050)..(1052243): n is a, c, g, or t
  misc_feature (1057205)..(1060318): n is a, c, g, or t
  misc_feature (1068672)..(1069727): n is a, c, g, or t
  misc_feature (1070516)..(1074243): n is a, c, g, or t
  misc_feature (1086719)..(1089539): n is a, c, g, or t
  misc_feature (1136080)..(1137066): n is a, c, g, or t
  misc_feature (1137866)..(1142586): n is a, c, g, or t
  misc_feature (1207052)..(1207151): n is a, c, g, or t
  misc_feature (1318525)..(1319078): n is a, c, g, or t
  misc_feature (1330827)..(1331903): n is a, c, g, or t
  misc_feature (1337551)..(1343863): n is a, c, g, or t
  misc_feature (1346839)..(1359455): n is a, c, g, or t
  misc_feature (1364269)..(1364817): n is a, c, g, or t
  misc_feature (1369478)..(1369597): n is a, c, g, or t
  misc_feature (1373964)..(1373964): n is a, c, g, or t
  misc_feature (1377891)..(1378181): n is a, c, g, or t
  misc_feature (1381005)..(1381104): n is a, c, g, or t
  misc_feature (1716272)..(1716371): n is a, c, g, or t
  misc_feature (1898378)..(1900994): n is a, c, g, or t
  misc_feature (1902632)..(1903384): n is a, c, g, or t
  misc_feature (1923874)..(1924225): n is a, c, g, or t
  misc_feature (2013417)..(2013516): n is a, c, g, or t
  misc_feature (3074820)..(3074919): n is a, c, g, or t
  misc_feature (3655456)..(3655555): n is a, c, g, or t
  misc_feature (4084570)..(4084669): n is a, c, g, or t
  misc_feature (4283405)..(4283504): n is a, c, g, or t
  misc_feature (4298420)..(4309139): n is a, c, g, or t
  misc_feature (4312980)..(4313133): n is a, c, g, or t
  misc_feature (4329460)..(4329559): n is a, c, g, or t
  misc_feature (4361465)..(4361564): n is a, c, g, or t
  misc_feature (4707429)..(4707528): n is a, c, g, or t
  misc_feature (6047486)..(6047954): n is a, c, g, or t
  misc_feature (6710239)..(6710338): n is a, c, g, or t
  misc_feature (7149083)..(7149182): n is a, c, g, or t
taagatgcacgcaagcagaaaccctcgagttcgtttctgcctgcgtcgtcatcgacaattcaacacacatcagccaaaggtagtaattgatctcatttcaggataaagatgattttcttatgctttagccgtctttgtatgaatctgttcgtctttttccgtggtaaaacccgattgtctcggtcgtacctgtcgtgactcactctagccctcgataggcgtgaacgggttgaagaagtcctggcccagccagtagcccgtcaggtacgtgtacagcggcgctccctccccgaaattggcggcgtcgtcaatagatcccgagccaacatacttggcaatggcggggtacggatacaccggacgcgtcacgttggtcgaggatcccgagcccgaagtgctggagagtttccggcgcgtgctgctggagctggaggagctcacccactggccgtgtgctggtgctgtcgccgtccgcggacttggtgatgaccttgtggggtgcgacgccttcctcgatccactgcatcatgggggccaacaggtcaagatccgacggaccctcgccgtcaccgcagtggtagactccagggagcaagtacagacgctcgaagccttccacgacgtcggcacccatggtagcttgcagcgcctcatggtaggcgatcgtagtgcgcggcgagatctgcgggtcggcccagccgtgccacaaaatgagtttgccgccggcctgttcaaaggccgagagatcggcactcaccgagtccagcagcgggtgacgcgcacggagcaggtcgatagtcgagttggcgaagtcgaagtcggccagcgtgtagttgtcgcctgggtattcgtcgaaggtaaggtacttgatggcagccagcgcggtgctggtgctcatgatggtatccgtggcggcgtcgggaacgaagacgcccgaccatcccagctccgaggagaactgcgcctcaccaaccgtcaggtggtcgccggtgtctgcgtcgatgggtccggcgtagaacttggccacagcctcgatctcagtcgacgtgaggcacgtcgagttgtcggcatcgctcgcgcattggatgctgtacacgtcaaagtcgcacgcgcgcgggtcggagagcaggccgtcttcaataccgtctagagcgtcacaggcactcaccacggcgtcgtgcaggatgtccaagcggtccgacagaacgatgtggttgccgtcctcgtcggtgttgctgaccgacaaccagccgtggtggaagctgttctggaaggagaagagcatggccggcgcgccggcgatgatgccgttgaagtcgttcgggtacctcagcgcctccatcaccgcttcacgcccaccgtccgagcatccgttgaagtaggcgtactcctgctcctgtccgtagtagttcttgatgagcagcttggccacctccgccgtccagtgctgagcctcgtaggcaaaggccacgcgcttgccctccacgagaccgaaggtgccgtcagtgccgccgtccatgtccgtagcgccagtggccaggttgccgttgttgactgcctccgaaccatcggcagcgccgactgacatctcgatggagccgcagagaccgccacagccgatctgcatgtagcgctgtgtccacgtcgacacggggagcataacttcccacgtgatcgcaggaggcagcgaaccttctacaaggcagtacaaaacgccgtcggtcgtggtctccgtagccgacgtgacgttgctaccagcgccaccgatcgacgtgatgttgacggacagcaggtcggcgcagtcgaccacggggtctaccacagccagagtcacggcgacatcttcagctgaagtagtactggcggcggcagaagcgccatcactgtagctcgtgagagtgtcggtcgtggtcgttgtcgagtctccagtgactacacagtcgtcggcggacacgagcgcacatgccagcagcgcaagactggggacaaagatcttcatgtcgtcgagattggcttgagcaggagacgtgcgtcgggggaatcggtatctcgatgtgcttgaggatgcaagttcgagaatgaccggatgcagatcgcaacaagtatcttatcacgttgagtaaataaactggattcgagagtgtccactaggttgtctccggtgtctaggtgcggtatattgtggatggtatttgatatcatctcgatcccaacaagcgctccttgtgtccacatgaagcaggctctcgagatatctcgggtgtgcaagctgctattgaatagatacttatacagcagggtatcataaatggatagtctccaggtcatcgaggtgggtctcctttgctatctcacacgtgtaagcacacagaacaaaacgaaaacgttgccatctgggtggattcgaccccgaggaagtataggaatcggatcgcctttgagtattgtgcatgtagctcgggaggttctactgctgtatcctcgtctcggtgtgatcaccccgctatcaaattcacgcaaagcgtcttccttatccctacgctgtcttttcttcttcctaagctcactggcgtgttaaatactacgagtaaaccgcgtacagtacatgtacctgtagatcggatgacttttatgacgagatcattgatttcgtcaacagagatcggtcgacgcgatcaccgatctgagccaggggaggcgccccttcttgtcctctcattgtcgtgacaaagaccatgaatttctcgctatgcgtcagagtgttcatctccgccgttgcgactgatgaatggcaccggtgctcatcgctcattgtgcacttgtgaagggcgaattccagcgtgaatacgttgtctggccgctcgattcgatttcatttgctgggctggggacactgggcgcattgaagctcgcgttccattctagcggatcggtcgagagcatgatatcaagcaggggggcgaacgcctcaaagcacccgtgggctgtatccaaggccttggacatcgtgctcaagtgagcggccaggtcttcaaactcggaatgggtactatggacgacggctggagcgttttcatcaattactgggtgcttcatgctgctgatgcgttgaaacgagcgcgtagaccttgctgcagtgtcgtcaggaggagcggcggtctcggtctgaaatgaagatatcgccgtaacttccgtgctcgaggccgtcacttccacaggcttctcagtcaatgcagggctagaaaccggagctggctgggttttggtccgcaccgcttgaagagccagcaaaagggcctctccccagtgctcctccatgtcattccgcgagcacgacgcgagatgctggcccttgagatacttgtaggcacagtcgcaaactttgagtgccaggcgggaaaaagggtgttcttgaagcacctgagcaaaagcctcggagcttagagaaaggaggtcacaggcgcgaacggtgtgcacagtgtaggcactgacactgcagcctagaagtccgcgctctccaaagtatccaccactgcgaagaccaaccgggcggtccaataccagccgactgtgcatgttcaagtggcccttgatcacgaaatacatggcgcggacaatgctgccttcggtcacgacgtgctcgtctcaggggtagctctcgaagcgcagtctctcagccagggaccgcgaaaacgcgtcgatgctctggcctccttcccagcaaattggagacacgaccttcataataaaccacgtgagcggcttcttggacacgtgaagcacgcaagctgtacggatgtcgcgtggcatctcagccaagagatcttcgtagttgacgccagcgtgagaagaccaaaaggacgtcatgaagacgtacgtacgcgccttgagcctcgcagccgtgccacgtaaagctcaacggcgatgaagttcttgcagtagtttacttccaggccaatgtaagaaatgaacaggcttgccagttcaccgatgacgttagacatcacaatgagaccgacaaaagacattccgatgtggaacgcataaattggtgcggtctcaggctgtgggcagtacgccttcttgacgaacgccaccatggcgaagaacaagccacgcaataaccgaagagtaagttgctcattcgatgggttccttgggttcgtgatcactagttcctgcgatgagagccacccttcccactgcttaccaaagccaacctccattgatacagccagatacgcacatgccgcccagtagacgaccagcagatagatcatccaaacatgtaagaatcgagtgacttcggcagcaacactacggcggtttagctcggctaggtagctcccaaggttgaagaacttaatgcaccgcgctaatttgaaccacgaactgcagtcataaacggatagaaagtcgtagaagggaatcgctgcaaggatatcccagatcattcgttccttcatgtagacactgcgcaccttttggtcgtataggtccatggattctggcgatccgtgtacatgccagctaaaccacacgtccagaataaaggcagcttggcatagtaatccgccagtgttcactaatacagccgctaccgttttacgcttcatcgagtccatcgtgagctcgtagggcaccatgatagcgacgtacgtagtgcaccacacgatgaatcgtacccagaacaagtggaatttgctttggacggggaccccgtgcatgaaaccatcgagcacaacgaggagaggcttgaaaatgaatcggtcgagtacgcgcgtcagcttttggctcgtcggtctgttgctggcaatgtcactcttctgcaaccgcgtgtgacttcgcttctgcttcaaactctcagccttttcatttacgatgtcagatcgagacagcaccttgccactagctgtggtcatccctcgtcgctgttcctcgcgtgagagctgcaggagccgtgcctgctcgcggttgatattcgcgatacgcaacactttctgcttccatttggggtatctgtcaaatactagctccagcgattcacgagacaatctgtacaaaatgcacgaggtctgagcctggatatacgcgtcacgtcttccatctgtaaacagagcattctcgccgaaatagctccccgccgagatctccgtcaccttcttcagctcttcttgggggctgttctgctgccaatcccttccagtgtcggtcatcacaggcccaacctgattcggagtgacattctcgccttccttccgatttaccaaaacatttgcaactgctctgaacgtagtctttgggcgattggcgatccgcgcgggcagtagcagcttaactatccccgtgaaaatgaaaaacatgtcgctgccactgtcgccgtactttacgacaaactcaccgcgcgaaaccagcacctgtgtgaactgggagacagacgagcattcgtgtgatcgacgtctccatcccagcaaggaagtccactttatcgatcataggctttagatacacgaggcggatgtctgtcaacaacgaaggcgggaggcattgcccaagcagatgctcctgcgtgatcgtgtggattcgcttaaacagtagaaacgtattgacgcgctcttgtagagcccctggcatcttgaaatggtctagcatgtggcgtacggctcccatcttgacgttaaattccttgctttcggagctcgtgagctcgattatgtcagtgaagttgccgatcacatacgcgaacaggaagacgcccaaggtcatagtcacgacgctgaaaatacattgcgcagtactctgggggtactccgactcgcctgacgaagacatcaaaccaaccgaccagtaaagcgacgccatgtactgcagcatatgcgatcctttctccagttgttttggcggcagccacaggttgtgaccgaaagctgtctgcttgcccgtcgcacgggtagcaaagttgggaaatgccacctttgacgcgaaattgaaccagatacaacctaggaaatgtaaaagcatgaatgtgtagtagagtaacttgaaaagtcgtagctccgttgtgcgcttcagataccgcgtctccaaagcatgtagctgtctgggaactttgaataaccgcagcaacttgttgatgttgagtaggtcccaccgaccttgagctggcaactcccagttaatagcatatagtggcagaagagcaacgatatccggcacgaaagccccagattttaaatacgcgcgcttgatgcgctgagggctcatgattttgtttccgtactcatagtatcccaggcgcgagcggatgtaaatatccagcacaaacgaaacctccagaaagatcatgagagcgtcagcatccttgtgcccttcatccaaggggaagcacgcttggaaaataaccagcacccattggagcgtcatgaccaagaacacccacgtttcccacatcagaatgaacaccgagtccggatcgtacacgacagttctcaggttgccgagtccagacagaatcttgtgtagaaacacacgcgacggaacttcgattggattctctacttcttggaaggtgttcacattcaaacccgccagcttgttgttgaccaagcgctgatcaagagcaagaagctcgttcttcaacgctgggaaaatcgcctccatagcttgcagctgctctcgagatacaaaaagtacaatacagcctctgttggcgcacacatgctccatgtatccctctccacgctccttctgtgtaagcgccgctgtgccgaagaatccaccacgcggaacttcagccgggggccctcccatctccactacacaaacctctccttcaagcaggaaaaacatgccagtcacgtagtctccatgccggtaaacagtctctccttggccatacagaatgaattcagcgttctcaaccagaatctcctcgagttggtcgcgcactgaatggacgccatgtagtagcgctaatgtctgcagaactggcatgcagatacttcgcagtaactccaaccgcattgatcgcgggagatcggccagtagttcacgaatcacagcgcctcgatgcgtagaccaccagtaatcaagaaaagacttgacgcgatgatggatcgctagcggggccttctgtcgccgaagaaaaagttgaatccgagtgctggtctcgaagaattgcttctgttcgaatgcagaggcggtaaagcgtttctgcacgttgtcaacaacgatagcggatatcaagaacccgccaagcatgagaaccagcgctgcaaccagttgacggtcactggtaggctccacggttttcccaggtgaagctagcaccccgacagcatagtacagcgaacgaaagtactccaatgcggtgatcccttctaactcgtctcgattcggtgcctccgtgaatattgtaccattgcagttctccaagtgtgttgcgttcagtcgacggagacagaggctagtggggcacacccacgcttcgtcttcattggaatcgaatccctcagcgtaagaaataccaaagtatatgcaggcaaccacgtgaaacatcattatcagcaaaaggatgaagagcagcagttgtcgccggctattgagctgaatgaaatgcttgatctcttttaactgtttcttcagattgaacacgcgcaggagtcgtggcagccgcatgagcccataattgtgcatgtttaaatattcgtaaggcagtgcgcacagcaggtcgaagacaaaatctcctttcagataatgagtcatactctgcttcggatccatcactttgtcggagtcgaccatgaacgacaaattcaggctcagagcgatgtcaaacaccaggacgacgttcgcgatggtgtcggtcgtttggaaaatccacgttggtcgctgccacaacggaaaaacaacctggacggggatcaaaagccagcagtagcatagattcgagagcaacaacaacagccaccacatgcgcactgcagactggtgatcaatgcatctccgaagtaatatcagtcgccacaatacatggtgctcgaaaattaaccccatattggggccctgttggctttcgtttccagcgggtactttaggtcttaagcccgggtcggtcagcggtggtgagagaaacgtatctgcacttagcatggtatctgggttggtatctcgtattcgttcgctgcgcatactccttttgctccactgcgaaatgtcccgtcgaagtggaccaatagctcgagtagccctcgagattttttgcgtaatgctctcgcgtcgggagggcataactttgttatctctccttgacggtattttgaccagggttggtccagctacaactgctgattttccagctgtgacagaagtccgacgagacgttagtttccttggggttatcggggtgctgattgaagtcgaaacgttagtgcccaacttgtcatcgctgatgttcagcagcttgaacatggctctgacatgaacagcgatcgcagaagcacagtccgggtaaccttcaagcacgcgctcgcagtgaaatctagacagcttgtacagaatcgcataggttgtggttgtaacggtagccatgcacggcaacaaggagaagacgtacagctcgcccaggcacgagccttttcgaatttctcttacggtcaccgacttgacgataatggcaagcactccggagtggacgacgtacatagcgttgccatgatctccaaccgaaaagagagtcgtctgagccggtacagctatcatttccagcaggcttgtcattgctacgatgaactggtcgctgcaacccccaaagatcgagacctcggcaatagttgccttcaggagttctacttggatatcgttggcaattgaaggacataaaatctttgcagtctcgcggtctgtcgatttcgcatccgtgtagtagcgctgtgggcaaagaaatacttcatcagatcatacccacatactacttcgtagtagcgcaagtgtatagcttacctttagatactcgatcgcttgggcttgctgattttccgggacgtgatggaaagagagaacgtgcaccagttgattaatacgcgcgcccacagcttcagtgttgccgctttcgcatttggagatcacgaagatagtcgcacacaacgtcgtgaacatggagaatccacacagtgcaaccaaaatcgtgaataaaaactccgtattgtgtcgtggcagctccccctcgaagagacctgtcatgatcccaacgctccagaaaagggaagccaaatagtgccgatgtagtgggagatcatgtagtgaggttgcggggagccaggggttgttttggctcgtgttctccccaaaactgaagcgtatacaggccaacacgtgggctagatagagcgtcgaagcaagaactttcaggagcttgagtacaacaaactgcttagcgtagaactcgtccagactcgacacgagatgcggtagccgtgaccatcgaagaagcttcacgaacaaaagcttcgtcactacgcggggaaagctgatcaccagaatctggacgggtataatcgctatgacatcaagcgcgaaatgccacgatcgaatgtatcgccgaatcgttcgtttcttgtctcgaatgaggttgccatctgagtagtagcccatgtgagcttggacatacaagtccagcgtgaacacgaattcgcacgcaaagatcaacacgaaaaaaatcgagacacctcccacgacctccggctggaaagctagcaagtaaggcagcatgaaggcctcgagaagaaggcacaccaatagggactgctcccacatcttgacgacggtcgcatgcggatcgaaagcatcttggcggtcctctgccagtactcgcgccaagcgtgtgtgtaaactgaacgtcgtgtggactcgaccagcagatttgcgagtgagagagtgtaaccacgattgcttatcgctgctcctgcttcccttgctgcttcggcttgccttactcctggcgctccccttgctcctggcgcttcctctgatcatcttcggagcatcaactgagctaaaacggaccagaccgcgttacgttgctacgtcgcacttgtccacgggattgtggccgccaaaataaattcttgcctaagtttggcatccatgaaactccgcaacgaacaaatgaggctaaccgttcagggacccgaatgatgaacaacaagaattgtcccttgcattttttaggcctatctagcatccaaatgggcatcgtcgaacagcgcttaatcatcagattggcgtaggtgatactgtgcatgcgacaggtactaaccagttcgataccaacaggcgggggcggcatgtgctagctcctcgcgagatgtagccaaacccagcagtgccttcagttgctttcgagcccctgcacgtcccttaagcacgagatccctcacctccaacggatctactcggtgtaagtgcgcgagcaagtccatcataaacttgtaaatgtgcgagtacggcacgtcggcattaatgcgctcagcattagccacaacatcgtcggcattgagagccggcactaaaggggtatcaaatcgtgacactctcgtcgtggacttccgcgtggatccactctggaaattcctaactacagcctcgagcatcgtacggtcgggggctggagcattgcaacttgtccaatccaacttgtttcgttcccgatactccgggaagttctgcaataactcctcgtacggttgctgatcgaggcgatagagttcagtaagggtgagcgccacgcacgtttcgagccgggagatcccatagagcaacgccaactcgccgaagtggtcacctcgttcacgaatcgactcggcagcgtcaagcttcaccaggactcggccattggcaatgaaatacatgctatgatcgacatcgcctttcatcgtgacttcctctccctcggagcaaacgacgtattttaagcaaaccaacagaccacgcagaaaatgttcatctaacgtccggaacgccacaactcgtgtggcaaagcctcgcagggtggccagcacaacatcttcgtacagaaggcgtgagacgctcgtcacagcagcaaactcgttttctcctttgcgccgtcgccacacccgcgcatagtacgacttgatttgacgcttgagcttcttaggaacctcattttgcaccaagtagtgctggagttcacccaggttctgctcgaatgcagcttcgcgacgtgcttgtgcatttagaagttcaccctgggcacccacaagtgcgccgtagatataaatgctccacagcgtgatcacaatctccgcaacgagttccaaggggttcatggagaggatatcaccgtagaaaagcgtcgagatgcactccatcgagaagagcaaggacctcaagtattttctcgagagcgaaacactacccaagtagaaggtcgtagactgctcggtgagcatccgccctgcatcttcaactgtcggtacatacgttagcatcccagatgtcgatagccacgacgtaccatagtgatggaacgcacgttcgctcgttacaaaccaaatgcaggccaaaatatgccccatcgcgagatacgatgccaacccacgcacgaaatataatgctgcatcgcttactggtacttttcgatcataaaccaggtactggaaaagcttttccgatagcggttcaatacgctgcaccagcaagaaacgattcatccttaaaaaccagcgtgaggtccaccacgaacagtgagccgtctcagcaatcgaaggcgcgtatgctagcggcacacggacttctgaaacgaaaagtaacagttcaagagggatcattgctagaatgtcagcgcgaagagcgggattgtatagaaaaactcgacgaaagccgccttgcgtcgagctgaccaagttggtgcccatgctgtgaactggtaaagaagcgtaccgaattctgtagctcacatccatgacgcacagaatgtccatgaagacctcaaatccggcccaggtgcgcagagtagattgaggcagctcggtcaaatcggtcgcaaagcagagctttaatggtgtgatcgtgacatgataaagcgccacagcaagcataccaataccccataccttgcccagctctttaattcgtctgatgaacgcccttgacttgggatcaaggatgtctgtgcgctcgttcacaagttgaaacttcattcccatcaacgaagggcgttgtacattgctggtgcgaagaattggttctagaaattgaaaacttgcacgcagctggggagttactggtcttacgtcactgagccgtttggcgatattggtcatacttggagcctgcgcaatagcagtacccggcgtgaaatctggatttctccactgacggtactggtgatacaatcggagttgtgtcgcgtactgtgggcgttggcagcgctgaatgatagcaaaatcaatgtttcccctccatgtttccccatctatcatcttcaaacccgttttaccctcttgggttaagccttgaaaatacttggcctcaaatagcggtagcgaatggctccgcctcatgctggcgcgagtgatccctgtcttcgtgtcttttatcagcccaggttgcttctgtatctcctcttgcatgatcacagcagagaaccgccgccttcgaagagaagcactctgttcaccagaacctgccgcaatcttcgatagcttagctgcattgtcgagcgcaactgctcttcgactggcagcagccgaagcttccgaggcattttggctgttgtagtgaaaagagtaagacgactgccgcttcacgagacctcgagaagggtggattcgaacttgtggacgatggtcattttcaccatccacgcttgtcctcggacgtgtgaaagttgtgtcggggggaatgagatcctccaacagtttgtcgacagcgtgtcgtacggctgcaaggatcttgaaccgtgcccagctttccttttccagacggcgcaagtgttgcttcgttagactctctcggatcaacttgttaaccgggtttagatccacaatgaattgaatcatgtgaatatcaaccgcttcgttgctgttggcagttgtaagacgaggtttatctccgatagcacttcggtacatttcactggaagcgccatgcgctttgcctcgcgaaaaactgtggcgtccgctccgattcgatacagccgaggatgcccgccgccgcaaatttaaggcggttagagcgtcgcggtattgggatgcaagtgcatcggtctttgtcaggaggtatttcgttttcttctcgagcaattgaatttccgagggcaaggagactctgctacttcctctcgtcgtcaaaccgaggggtcgtacggttggcggagtgcccggcaaacttggttccggggttgatgcattggaatgcgacgaagcttccatctggcgagctgccagcagacgtttagctctgctcgctgttcgtaagttactccgttgataccgcaaaagtcgaccacgaacccagtcgagaatagcgtgcagagcatgcttctgtatctgaatatcggataggtcgccatccgtcgtccaaagttctttccagtcgtgtttggtaacgtaaagcacttcgcacgaagtggtcgcccggaccgttgctagtcttcgctgcttcgagagaaaaaaagcaacttctccaaacagcgcaccttgcatgagtgcagccacgcttgtcactgaatttgtccaaaacgcggctgcaagtcccttccgcatgatgcacaaacgactgccatacgtcccttcaactaaaatgttgtcgcccgggatgaaaagctcagactgcatacgcaacgctaggttattgatctgtagtgcggtaagaaagcttcgaataggcaataatgcaatggagtgaccatagacctccagcatcattttgagtcgaaggtttgcagagaggtcgtgcacggtgctgtgcaaatcaagccccttcgtgtgctcaaactggagatggaagaagaagctgacgcgttcacgtaggttctcaggcaactcgtgttcctttgcaaagctgtcgaagctagcgatccgatccttgtactgcttcgcttctttaccaagctcaagaataagttccgaaatctcaccaacgatgtggccgataatgaaagtgcagcccaggcacgtaaatgccgtccaaagcgtaccagctgcgtcacgagggatactttcgcgtgagcccacgagcaataaagtggtaatagaccaatagaacgacttcgcatagagtatcggaactgagttgtgatattgatgcagcaagtggtcttcagccatccagcatcgttcaacatgctcacactcgttctcagatatcaggaagaaaatgcagccgacacaatgtgctaccaacacaagaataatcatcaacttggcggggctcaaataagcggagacattgtgcgacgcgaagtgctgctgtatctgcactattacgtcgtccaggtacgtcaaaagatccacacaacgtacaagtcgcggcaatcggcacaaactcaccactactgacccgctagctcttggcacgtaaaggggcaatgatgcaacaagatcccacctgaaagttgcgctatgtaggtattgagaatccatctcttgcctgctcacaagattttcaaagccgacctccgagcccccaaagtagtaaagccgtagatagatatcaaacacgaaacaaaagtcacatccgaagtcagcaagccacacaacggtgcttaaacctccggaaaagtgaaggtgtgcgtgaaaacatatccggaaaatcacgaaaatgacgttgtaaatattccagcacgtgatgacagcattccaaatgctcgtgaaagtgcctcgaattgcgtcaacatcacggaggccttgtttctcgtttttaccaccacttttaccgggtattatcgccatggtatcgtgctggcaaaaaagagtagacgtttgcatcatgtggggctgaagcttaaggcgctcgagattgtgcacaacacgccgcatagaattgtgctgatcaatccacataatatgggcttcctcctttatatcgttgaggtcgcttgcaaatttgcgttggatgacgtcgaattgctcgcgagtcatgaccgacgcctggacaaaagatgccgctatgagtgtagcactatgtgctttccgaagcaaaaattcggtaataccgtagcattcaccaccgttgagcgcacgtatcgggactttccgtacgcggaagaacacgttaactttacttccatgcagaaagacgaaaaactcgcggcaaatatcaccttctagacaaatggtttctccatgttggtagctgtgatgtcgaaatttgcctgtgatctcatgaagaaactccgtgctagccgaatcaaaaagcggcacgttcttcacagcttcggaatgcaacaacgacgatatctggtagcaaagctgatcaggtaagtgcgatagcagctgagactcgtaggcatgtttgtgctccacaaactggtggtgatagaatcgtcgaatctctccgcttagtttctcggaaatatccatacgctccaggatactgttcagcgtattcattttctcgatgtggtgatgccgtgttgccattacgttcgtaatcgtgcttgacattgctcctactacaccaaaatttatgatgcctcccatgaaaatccacaatgccgcaaagtagctctcggcagttgaataggcgacgatgtcaccgtaacccactgcggtcaacgtcactacggcccaatacactgagcgtaagtaggcaaatgaggacgtgtacatggaagatggttcttcgacggggaaagcttctccgatgtgagcatagcaatcgaattttacccacgagcagttctggaacagcgttgcgtgttggagacagttctcgcgcgacaattctgacatcacctccgaactagcgtcttcaaacgttgacccccgttcaatccaagccatttcgaaccacacgcagccaacgacgtgcaacattagtgttacacccagcagtagggagacaacaaggtgagctttcgagctcacaccgtggtaatcactaatgctgcggaacaaaccgggcatctcacgtactcgcagtaagcgaagcaaacgaatgagcgataaacgccctcgtgccgcgctgatagggtgggaatcaaatatcaagccgacaggaagccatgctaacagatctacgtaaaacccactagcccgataagcagcaaaaatgagatctggctgtgtgacttccagcataacactttggtccaagaaggcgaagtatcgcgagcgcaagacaagatcgacagcaaaataaacctccaccagaagtgtcaatccgtaacgcacaccgaacttgggctgctcagcaaacatatcttggtcatcggacatcgcaataaacacagaaaagaagggggcctcaaaggcgacgtagatgacagcgatcaaacgagcagtttcccagtacacacgaaacattgaaccaggaagtcgccagcttacaccgcgcctcatctcaccggaataagcctcatcagcaacactatgggtgctaccgccgaccgagtttctgccgccactctcatgaccaccacgcaatcccagcaatctcttagtcttgcgcaactgcgtcgagtacttttccaaggtctcaatcatgcgcgtgcgaacagcaacttcgttgcctctgtgcgaaaaggtaacggcttcatcaaacttggctttggcgagaacgtaaagttcacaaaatgttttcgcgatcgctttttcttcatacttttccgggaagagcaagcatgcgtccgcaaagaaatcccccgtgttgcactcctttggactagagccattaaaagatgacagcaccactttcccacgaataacaaagaacatctgcacgttaaacttgggctcagtgatctggtcagctggcgaatacacacgacgcacaagcgcaagagcgagcaaattgacgaattccacactttctttcatgagaaagcatacttgttttatgcgagtagccttcagggtcgcgacaacttttgactgcaagtgtttgggcatgatgtgcagcgcttcttcgctgtcaagactgtggtgagtactccaggagtaactgaaatacgcagtaacctgccgccgaatagtgcgcgtaatgtttttcgagtgcatgtactcacgagcattgtccacatgcgttgtgaaagctgcatatcgcgcattccgaatccgaaagataaacagaaaagtcgccagtaccgacgatccgaagagcgcacccatgagcgtcacgatcactgcgtacaccgtttcagcatcggagacgggggtaacatcgtcatatccaagtaaaaccattgtcctggatgcccagtacaacgttcgagcatatttccgggctactgttgcatcgaaaagccgatctcgcactgcccagcttgtctccacactttcatcacaattctccaaggacacaccacactgggcatgagcaagaagcatatatccacaagccacatagtggcacaagccggcgcacaacccgatattgcgcacgagggtatcaatgcctgtggaagagaggtgctggacccatccgcgatccgaataaacattggctacccgctccaaatagtggcgtatcctgtagatgcggcagatcttggtaatccgcgtcaggtgcaatgcattgtaggctccagtcgcgagggctatagcgtccgtcggcacaagagcaataatctccagcacaagttgcaaattgcgcacgcaaaggtacttccgatgggacttggtgacgtccaaccccgcgatcgatgacaatggtttgatggaagctagcgtccacttggcctttcctgtccttagggcgttgcccgatgctgtacggcttaacgtcttgggcatcttgagccggttggcatctctcgtcagctttttgcccagctcaaagctcacctcctccgaaagctgcgagaacgagtccctccacacacggtaaaacccgataaactccaccagcccaatgacgtcagccacaagatccagcggggtgaagatggacaattcctccgtccatcgatgcacgccttcctgctcctcgtgctggaacgggttgtagtaaaaggcgatccggaacggcaccgtcaggaaaatgtagagagccgcatagaggctgatggtcaggttgatggtctgcctcgtggtccacggcagtctcttgtagagtctggatacaggccgagagcctcgtcgatacagccgtctgcagactttcaggaggcttcggctggacaatttggacgcagtcttcaaggtactgcgcgggacttcgaactccaccgcggttaagctggttctggggcgggcggccgggtcttccgtggccaccaccacctcgtgtgggtcgtcgttctgggccgccgccgcgtacactttgcggtgaggcatcgtcaaggactgcggcggtcgctgcgactcatgaaaagtgtctgcaggttgtttctgtcgcctgctgactgtagtagccgcaattggcgcgccgtcggttggtttcgcgcatgccgccgccacggacagctatttagggcgccgacccgttagcaagagtgcgcaatttccccagcacacacactccgctaattgtgtcgtccacaccacaaattgtgttgcccacacaacacgacacctcagtgaccatcactcctgagcgcattccccctcgcccatactcagttcaggtgtagcgccgcgcgaggacgacgatggactcatcgaagcgcgtggcggacgccaaggcgccgcgcaaggaggcgccggccgcggacatgaagcgcctgcagaagttctacgcggccgaccggccaccgcgcaagcggctgcgcacgctgctggacttcctcaagcacccgccgggggcggagggggcctcgggcggcgggaacatcgccgtcgccgtgcagtcgctgctctccggcgcctccaaggaggccgcgggcgctgccaacacgggcccggagcacgccgccgccgtggccgacttctggtccgacgccaacaacagcacgctcgtgttcggcgtcgtgaacgactgcgtcacggagctcgagacgctctacacgccccacgagacggcgttccgcaagcagcgccgcaagccgctggaagccgaggactggagcgaggtgttcgaggggctggaggtgctgctccgcaacaacgcggccagactgcgggagggctggaacaacaacggcctgacgatgctgttcgccaagctgctcaagagggacaaccactccatgatcaagaagtacgcgtttcggtgcttggcgctgtacacggacgccacgaggaacatccagcagctgtcggccatgccgtctacgagcacgtcgagcttccaggcctcgagagcgggcagcatccggctgatgagcgacggcatcgagatcgacatcgacgaggacgagggcgacgctcggggcacggccatgctctcacacgccatgcccaacaggaagaacatgcatctggagctgctgagagagagtgttgacttctctccctatggaggtggcagcatcatgctgcccgacaagtttttgaacgaaggagtgcacgtggaagggtggatgaggcccatgccgacgcaggcggaggagcccgtggatatgctgaagtttctgatggacttgagtttggagagggaagatgggcatgcgaaactggcgcccttgtcggctactggcaagccgagtgggagcagcgacaggttcattttctgggcagagctgattatgaagttctacatgccgttgctgtacccgaaggtgtgcctcaaggtcaagctgaaagaggagggggacacgctgggatttttccaccactgccccggaagcttccagcgagttgtggcgcggtgggtgtacaagttgcgttcgaaggaggactttatggaggtgctgtggtcacgacgcgagttctctgaagtgattatggaaacgatccgccaacgatttgcctatcgcgacacagagctggtggtggatgcgattaaattttactctggaatctgcactggggcgcagtatgtcccgtccggaatgaaagcgcagatgaacgagtgctctcgcgcgatgatttcgcatgtatcgcagctctttcacccgtcggttcagttggatgactcgaagattttgttgcactgcatcgaactattggagctcgtttcccagcgacggctagatgattacacttccacataccttcggaagttcgtgctatctactatcgacaactgcaccatactgcgcgatccaagtaaccgccccgttcttacagcaatgctttcgattgtactgcacgtgtggatgcactcggcggtagtcgcgaaggccacaggtgcacagatgtggatggaacttactattgccattcggcgatggcttgtcaaccctggggacgctaaggttgtcggggttgaaatgatcaactgctggaagcgtgagctccgattttcaagctgtttgctgatgtacgtcatggacaagggctactcatatctgaaagtcacgccggaaggagctatgctgctacctcagaacggtgccggtggaaaggatgataaggtatcgggaagtgggaaaaccttgcgggagctgaaacaaggatatttgcagtcttcagccaattttcttatgatgacggttgtagaggtatccgacgcgacgctgcttctcgatcgggtattacaccttatccctcccccaacggtagctgcgcttccgccaccgatgcacctcagcctgaccgaaggtatgctacaattggtggaattgtggatcgattcggcgattggagcacagcgcacacagccatcggagctgcagcaaattagtccatccacggttctcgctttgtttggcgagtggtttttacctgcatgtgaactggaggctcccgattttcaaaattcgcgttgcgtggcgattgtggctctgtgcaagctctgctcagtccgctgcactaactcaattacgcgcggccacctgacgacccttgcccgcgtcctcttcaagggaatcacatcaccatccggggtggttgtttccaccgtattgcagaaatcatcggtgctgttctcgttgaatctcgaaggcctcaacatcctcgtacccgcctatttgtatgcggtcgatgagatcattattggcaacatctggagtcgtgcagagaagtctaaggtcaagtcgtcggagtggaataatgagctgaacgcagcacttgatgtggttttcgctatcttggaattgcccaaaaggttccccgatcaagatttcgtgcggtggagacaaaaaattcagggcgtgtgcggtattgacgagatcagtttgatgcaggacatcattgatgaaattccggagacattggatgagtttcacgtgattattggtcgtattctggttcgcattgcccagctcccgtttacagacgtcgtggatattaaaaagcgtgcactgtgggggatttactgtctcgtcgtcatgaacctgaagccaagcatgaatggtgggcacgccgtggatccaattcatctagctgaatgggttgtgcatctcgtggatgtatgtcaaaacatggatttctcaatttcgatggcagcactctcgattttgcaagacatgtccgactaccacgaggaaattaacgcgtttgagccttccctggtcgcgcggattgtcatgacgctggcagtgtttgctcagcagcaagttgaagaggcttccatcgaggttcaggcggcaatggagcgtatgggtgctgctgatactgcaagtgaacacagtggctcaggcaccaagtctgcctccttcacaggatccagtctcacaggtggctctcacgtttcaggccccagtggaggggctcgtcgtggaagcgacaatcctagggcgagtcgagttgagggttcaatagccagtaatcccggtgaagcgacagacgcgtttagcaagctgaagagcaagctgaagcctggcgcccctaacgcccctgcctctgctccatcacccgtgacaaacagcccagtaggcgaagcaacgtctgtagctgcgcaaaaagaacaggaaatcccggctcttcgattgattgtgcagaagaccagcgcgatatttgaatgcctgcgcttttggctcatgcatcgaacggaggttttacaagacgctgacgtaaagaaattgatcttcagcgctatcgaggcggcgttggtgggtacgctgcctgatggtgaatggcaacgcgaagttgaacgtgctcgtacgcttgagcgacgcatgtcgatgccgcttctattcctgggattgcaaatgcgcgcatcattgaataatgagccaggtcatgccgggttgaagtgctttgaagagactgctgtggctgccgaaggactgctgatgcacttattacaccacatcaatggattcccgtcagctgcaggggttgatcagatggtgtccgactgctctgaactcaccgagttggatgcctcacgcgataatggagaagacgattcaccgcctgcggcgttgagctttgtgttcatggactcgatcgtgtttagcgttgtgggcagtttagactcaccgtgcgcgcggtttatcgtacgcgatatgactgggcttttcacgtgggagataacaccaggtgtgatgccacgtggtgggcattcactaacaagttggatcggcgcgggttctgctggaaacaagaagctcgacgttaatgcccccgttgagagagaattgaccctgcagacggatatgatcacggactcgctggcactgcaccaccccactggtgccgtgcaggtggaattcaagcacactgacgaggttggaggtatatgcaaaacctgtggcggggagaagccacgaacgaaggcagccccgtctgatgcaaagggtggacgcagcaatgcttcgtcggggatcaaattggaggcgcgtcaggtttcttgggaacaggaacaagacaacttgtccaataatgtgtgccccatcaagagcagttatgtttttcacgaagatggaagttcctcatccacaagtgcgagcaccaaggaaggcggcgattccaagaaaaaggagaaatcgcgatcatctgaggtcgaaaaaatgccaggcagtggaaataaagatgagcgccaagaacgcctcgagcggattgcaaaacaacacgaagaacgcaataacacgggcacatctgcacagcccaccccagagccgcaaaaagtggtttgccactgcccaccacagtccgaatcgaagttcaaacgccgtaccacaactacgatctgtgggcttttcgatatgtcgattaatgagccgaacgttggcagtttagatgacgaacgatgtttgctggacctggttctagacagcattccgatggtgttccgcgactgtggcggtgatacgaccgacaaaacccttctgggcggccgctactccatgatgcgctacaatcttatggatcttatgccctcttcgaacccccttctgatggactctgccgaagcatcgggattttcattcctacaacgacttattcatgacgaagaatgctactcgcaactgaagaactttttgacaaaggaggagaatactggtggaaaagaacttgtggagttttgtgacgctgtgaagaagtatgaacgctcgtctgtccctacggatcgcttgggccaggccactgtcatttactgggaattcctaacagttgaaggagggaagaagctcattttcccaactgcaatcgtatcggacattcaagagcagattcacaaagcccagtccgccctgagagcagcagcggcagtaactggtgaggatccttcagcgccaaagttctgtcttccaggctcgcttttccagcacgctatggcatttgttgagtatgaaggattcgagaagtcgggcttgctggacaagtacgttgcagcgctggaccaacctgcgacatcatcatcaacagcaggctctaccagtgcaagcaacggtaaaagcagctcaagcacaccgtccattccaccccagcttgcgcttttcgactcattttcaatcatggaagtgaatgcgcgtgtatcccacctggctctgcagaaacgaaattcggacgagcaattggtgaaaatgacaaagccgggtgtgactgctgagcgtttgatggatgtgtcaaacagcagcctaaaggatagccgtgttagcgcgcttgacatttgtcggctgttcttgtcacaagcgggtctgttaccatcccccgacggtgattcgaagaagaaatcgactttgaaattgctggagcatggaccaaaactagagcggtcgttgaggcacctggataagagtccgacgcgcgaaaccatgaagattggcgtgatttatgtgggcaagaggcaacatactcagcaagaaatcctccacaacgagaagggaagtcgcgcttacgaatcgtttttgtcgcaacttggctggaaggttgatatgcagacgcatcgtggctttgtgggtggtttggacacaaaccccaaaagcctctcgaacggaaagacgacgctttattacgctacctcgcacagcgaggtgatgttccacgtggtcaccatgatgcccacaaaggcgtcagacccgcagcagatcgacaaaaagcggcacgtgggcaatgactacgtgcacattgtctggagcgacaacgcagcccaagcctatgacccgtcaacaattacgagccacttcaatgacgtgcagattgtgatttacccacttcgaaaggcgcaacgtgggctctacttgatcaagatccacaccaaggataaggtgccacctttcgggccgctgcagtcaggcatggtggtccaccagtctgaccttgcacggcttgtgcggcaaacagctatgaacgcgaaccgggtgtgccgctcacaggtaaactcgtcgctacctgatattgtggtgtgatcggcggtgctaacatgttatgttgctttgcagacaatgctgtatgtgcggccgtatccgacgcgaaagaaattagtagacgaaattgtcgaacggtatgcggtcgagtacaaggaaagtcaactgctcacgatgctgttcggtaattccgcgtcgacgtctgcttccatcccgacaccgtcggctggcactgattagttttagtcagcccagtgaatgttaaacgattatgtggatgtacgttttggcctcacttcgcgcacttttactaagggaggatctttcatttgctacgagaattggtagcgagtgagacctgctaagtactcgagaaaagaatgccacagtgaataaataatacatgtagtcccttccaccagccagcactcgaacgaattgatgccccccagcatttagcgctggtaacgaagggggaagcgtcgaaggaagcacgccccactctgctgaagctgatgtctgcagaacacacggacccgactcactattggtgtgtgcatcttcccatcaaatgtgttaatagcaagctccttgggacgaagtgttatgcctgctatactgcgtgttctgtagttgccttctgtacgacgtttactaagtttggaattatcgacgtaggaggcaaggcacttaacgtattacctgacgtccacgttttgcatagcgacgcaatgagaagggcgagcaggagcagcatggggagcaagagcacgtctcgtatcgctgagccgcagatccgtcggtcgagtgcacagctccttcagcctccacacctttttcgccaaagtcttagccgaagaccgacaggacgctttcgacccgaatgcgaaagctatcaaggtttggcagcaggttttacttgtgggtatactgctgaaatctttcctactaccgtacttcacagcattccagccaggtgtagtaggcaccatctctgcattttccgcgcttatcttggtgtgtgaagcagttttcatggtagaccttttcatccaagcacgcacaggtttctactctgacgggaaccttatccgaaacaagaagcggacgatacggcgatacgtgcactcgcggcaatttgtacttgatctggtagcgctcctacccgttcagcttcttggactaaaatgctgctgtttaagctcatcagatggtcaaggctgccgcggctcgtgtcgaatctggatgagttctactcgaagtatttcgtggcactcaaactagcaaaggttttggcgtctacattgtacttggcccacattgtagcttgtgtacgctacagcttcggggaagacgtcaacagcgcagatcattggctgcctgtgtacagtcctttacggcaccgcgatcactacttgacatcgttgttctggagtgttgggatcatgacgggtctctttgaagggaaattgcctcgccatatctccgagttcgtgttcaccatcgcggtcgcactctgtggattctccctcttcacgacactatgcgcaacaatcttcgtcatttccaagtgcgagagcggcaactcagaggccacgaccgcacgaatcaatcaactcacgtatatgctctcctttcattgcgtcccggaagagcacaaggtccaagccatcgagtatcttaaggtacgtcgtcggtcgctttattatgccatcgttggtatcataactcactaagtcgacactttctcgttgttgtccagcgttattacacggatgctgagtcgaatgatcgtgagacagtgagactcttgtgtccgtcaatagcgaacgatatccaggttaagctcctcaagtccacaatcgcccaggtttcgctgtttgacggctgcagtgaccagtttattgtagccatgacgagtcttttggagatggtcgccgtaccagcgcagacgacgcttttttccgctggagactatggagacgcgatgtacgtcgttcactcgggtgtgctctccaccatttgcaattctgtgacagtacgcgagctccgcaaaggctcgtgctttggcgagatttctgtcttttcctcgctctctcgaactgccacggtcgtatctacatcatatgcaaccttgtacaaaccctcaaggtttcactgtgaacgggtcttggagggatacccagaacgtgctgctttgaggcgtttgtcccactgcttcatattatgctatctggtgatccactcgagtggcactcgatcgtattcgatgccaattcggatgctaggaagcgattggctacatgtatgtgggtcacataacacaatttagccctgttgaccatgcgacgcgagttcaaggtgcaaccgccgcctgcgtttcggaaccatgcgatcgatggtctaaggcgctgtgcagtgtacacttcaccaacctccattcagcccgcctggacaaacgggtcagcaattccgactaatcgttgtgggccatggcgtcggcctccaagtctgccgctgcgggggacaagaagaagagcaagaagagcagtcgatccagtggcgccgaggcgacatcacgcagcaaggacaagggccgcaagagcaaggacaaagaccgcaagagctcgtccaagcgagagaaaacaaaggcagcagtagcagcgccagcgccgcctcctgagccaaccagcgtcgtttcagctccgaccccagtcgcgccgctgatccacgacccggacgccattcagctgttccgtcgatacgaccgcagccggtccggtggcctcactcgactcgacttcctgcagctactgaaggactatgcagacccgacgagcaacggatgggggtcgtccttgttatcgcggccgccgctgtcactcacggacacgagaggcatcccgctaggctatcaacgagccgacaggaactcggagttcgaagcaggacagctattcgagcggtacgataaggaccacacgggcgcacttactctagacacgttccacgtcttcttcgcggacttcaagccgcagctaagagcgttcatcgaggagagcaactaccgagcgctcgcaccgcccccaccggttatggtagccccggtgccgctgcatcccgtgcaggaagaagaaccggtgccgcctccagctgaagtccgccatgttgcgattggaggggataccccgcttccaagccccaaagtgactcgagcgccgtcgccgaagcacgagaagcaagcagatctggaaagcctcttgcgcgtcaaagatcaaatgatctaccaactgctgcaggagcgctcggcgatgcgaaaagagcgagccgcggtggaagcgagcttgaagaaactcagcgacgtcagcacccgcgagatgaaaaagtgggcaaggttgacggacgacatgcaggccgaaatcgagcaactacgctcgcagctgcgtgcgcaaacacaacaccgcaccgcaatgacaagcaggtaaaataaaatacttgaagtaataaaataccaagcttagtaaattcgcgtaatgattcattatcgtgacttcgagccgcgatggcttctccgctgctggtcgtcacgctggtgctccgctatcacaaggaaggcgctgcactcgagcacgttggacgccttatcgccagctacgtgggccccaagagcgacctgacgctacgtgatgcctgcgagtttgggtccaccgagctgctggactggaagtgggcgatactttacctgtgagcgcttctggtagtggtgaacatgacggaggcaacgtggtgcagtggggaggtcacagtataccgaagggtgcgcaggaagagcatttcagcgtcgtccggtttctctacgagaacacgccccgtaccttgtctgcggggtcgttgacctggacaatcgcagcccttctggctgcaggcgaagtggcgctcgcggagctgttgctgcctcctggaaaatccgtcacagactacagacgcttctcttctaaagctgcgtccaagcgtgcagttagtgctggcccagtggacgagaaagttgaagctgcagctgcactgaagaagcaagtcgaggttggtcgcttagacctcgcccagagagtctgggagaagtacgcgtggctcatatcgtcggatgaatggatgcagcattggatggaggcgatggcaacagcatgtcagatggggaatctcgctattttgcagtggatgatggagcacccttcgggtcgagcggctatcacgttctcgaagaagcccgatgatttgattcctttgttgaataacgcagcaagtgaagggcatctagaagtgatggggtatctcaatgatcaagggttcgctgtggattttggggtcgcgctactctgtgcgattcgcagagacaacatgaaagcggtaacgtggctgatagcgcacttcactccgtcggagaagatccctgaatattgcattctggtggaagctgcgaggtatggacgtgtggggatgctgcagtattttcagagctcggagtctctggaggtgccgggtttcccggggtcaaaactatcctcgatcccaagaacaggtactaaattctcacccgacattcgcacagccggactaaacgcgcactcaacgggatggcgatcaacggacgctatggacgctgctgcagccaatggacaacggaaagcagtcaagtggctccatatgaatcgaactgagggttgcacgaagagcgcgaggatacctggaagtggtgaaatggcttcatgcgaaggcttcacggacagagccatccattccgcggtcctccatgatcgcattgaagttgtgaaatggttgataccgcaagcaccaacgtatatgaagagcggtgcgatggaggacgctattaacaaggggaatctagcgttggtgcagtggctacacacccaagcgaaagttcgttgcacggcaaatgcgatgatccttgctgcgggacatgaccaattggagatactaaagtacctgtactcgcatcgacctaagggtgctgcgctcaagagctgtggggttgcagtcgagagagcaatgagcgaaggccatttccgcgtcgcgctttggtgttttaagcactttcctgcgcgtaatcccagtattgatcggatttctatcacgagtactacccggaaatgttcgcggagcatggcgtggaagcaatgcgtgagagagcgagacagcgtcgtccggcaggatttggtttcatcgcgaagtggctcgactcccaggtgccgagtgcgtgattgcatccggaacgtttatcgttcttgcatcggctgctgtgccacaaaccttcgagggtaccgttttctttttcttttaaggaagtcaacgtctaactacatattttgatcaatcgttgctcatttgtcggtgtcggaccaactttcctgtatcatcccttcatgataagtatttgcgaactcaaaaatacaaaaaaatgaaagacctcggagaatgcggtgaaggctgaagaagtcgtactgctttttttttaaagtagttcacacggatgccttcaagtgacgatggagagatgttgcggcccaaactagtcacgcaggcggaggttagatctcacactcgctacgcagcactccagcccattctcaccttgcaccacactcgcgcagaaccagtcattccgtggcagcgctgccagcgctgaccgcatacgcgcatcgtagcgtagtccaccctggatattcgccagacgggcccagcgatttcaatggtccatcgtgagcgaggaaactcaggtccagcgagagttgtcgtcgtcgcagctgagcggacgcgcgccacaggcgccgtcgaacgatagcaccgagagtaccgagttgaaagatatcgctgagattgttggtcacaatgaaccggcaacatgacgtgcatcggactgtggacgattggcctgattgcaacgccggactcgtcatcgtcgggcggccagcaactcatcgttgtgttgaccttgcgggggtttgcccgtcgtgaatcgtgtgcgagcggcgaaagcgtcggcggcaacgtggcagcgtattgcagagcagcgcggcggcatgatataccaggaccaatggcgctgcagcgtgcaagtgcaagtgtaccccgccaaccggctcctgaagatatgcctttcaaagtgtccttccatcgacgaagcggcgcgttcggcgctcgttcgggcacctggcaggggaatgttccacccaggatcctaagagtccactccaaagaacgttccggactttggcccccttcatttgggtaccccatatgattccttcgaaggtgtccattgcccattgctggtgagctcaattgatcctaggaaagtcgtcgccttgggttttatgatttggaaattcatattcatttttcatcttcatagaggggcacaaccacaacagatttaggctattaatactatggccgtacattgcctgaggccgactatgtttttgtggtcaaagtgtcgctgcttctgctttcatgtttttcgtacttagtagtctattacgagtcgtagagggagagtgggtaagaaaggcgagaggttttatcgattcgtgttatcgtgagtctacaggaagaaaaacttgcgacgaggtttgcattcgatttttagtttagaggcaccgcccctacgatttaactttcccttttctacacaagctggccaataggaatacatgtattaatacaatacgaccctgcaactcgagcaccgcagcagtgcgctcgactaacttgttttccatgtcgcctcttggacccgtacatcacttaactatccatcactaccaagctaaggcaagttctgacatactcgagcataattagaccgaacgataccgcgccagcacaagactcccccgatatctccttggctagttttggacagctacgatccaccacaacatcattactattgacggtgaaattggactctattgatccctggggcaatctggcgatccttggatgaagtttgtgtgcgtaatacatgtacgtgcatagataaaaaatatcctgtttattttttgtaaattggtttcggtttcgtcgtaaacttcgactcgaaataaactaccaaaaaacatcatttaagtactgaacaaatatacaggttgtaatgaatacattataatagattgcttatgttctcatattagctgtttcggagagtaaaactaaccaaaaaaagaaaaaaatacgcttttgttattgatattactttttcaaacttcaagtttagctgaatccttacagcggcgtacattctgtcctccataaggacagctgtggcaacacaatcattcaccgacgtacgtgtactaagaaaaatggctcaaggattggctcaattgagcacctagcctggctgcagtcccattatcagacggtgcaaaatgccataattactaccgttttaccgtaaatagtgacagatgtaattactgcaaatattccagcatctgccacaaataaccgtgacccgggccttgatctctcttactatttgtaaatcacctaccagacccgtttgtggcaacaggtccagccaatcagcgcgcatattcgttccgcccaatcagcgcggcgctccggggaagcccagaaaaggatcgaggcccgaagcgtcggagagctgagccgcctgcagtcgcccggagtcgctgctccgcccagggccctcgcaggtgccgccacagagccacgtgcgctctcgccctcgccaccgtcgcagacgtggaaacgccaaccaactcgcgttggctccaggccccgcacacacagataaccgccggaaacccacgctggccctgcggctccactgcacctagcaaccagccaagagcccggagcctacatacaacccagcccagagccttcgagccttagcgccatgttccggaagaagacggccgggcccgtcgtcgacgacaaggtaaagcatgaactccgcgtaatctatccgctggaggggtaaaatatttgctctagacgtgagatggcaatgggtaattacttaacgctcttatctgctcgcttgcttgctgtgtaggaggctccagcggacgccatctcgcctgctgcccccgtggaggcgccccgggagcgtcggacgtactcgctggacgacttcgatctgctggcgacgctgggcacgggcacgttcggccgcgtgcggctcgtgcagctcaagggcgtgggctcgtaccacgcgctcaagatcctcaagaagagcgagatcctgcggctgcagcagctacaccacatcaagtgcgaggtggagatcctgagcaagatccagcacccgttcatcgtcaactacctgggccacttccaggacgagcggagactctacctcgtgctcgagtacgtgcagggcggagagctcttctcgtacctgaggcgccagggccgctttcccgaccacgtggcctgctactacgccgcgcagctcgtgctggccatggcctacctccacgcgcagcacattatctaccgggacctcaagcccgagaacctgctcatcacgtccgaagggtccctcaagatcaccgactttggctttgcgaagatcgtcgaggacaagacgtggacgctctgcggcacccccgagtacctcgcgcccgagatcatccagagcaagggccacggcaagtcggtggactggtgggcgctcggcgtgctcatctacgagatgctggcgggctacccgcccttctacgacgagaacccgttcggcatctaccagaagatcctggacgggaaggtcgacttccccaagcacatagactccaaggccaaggacctcatcaagaagctcctttcgcaggaccgcaccaagcgactcggtacgtttgttttctacgtgtggtggggtttcattcatcgacgagaggactgacgagttactgctattttttgcgctgcagggtgcttacgaggtggctcagaggatgtgaaaaagcataaatattttgccaaagtggactgggatgccgtgctcgcacgcacggaaacgccgccgtacctgccgccggttgggggccccggcgaccacacgcacttcgacgagtacccggactcgcccgtggacgactcggtcgtgctgtacggtgaggacagggcggccttcgacgtgtttgaccaattttaagctccatttggggcaaataaatacctttccatgtcttttgtgctgataccgtccaggatttgttcgtcgtcactttatcacacagagatcgacttcaacttggagctgttcgtgcagtgaaaagctcgcgtgagtgttgaaattgccatccgaacgcaaactgaacgcagccaagtggcgcgacacgatcgttgcgttggcggtgaggccagcaggtctgtctgtttcgaggacgacgtcgcgttatacgcaacgaactgcgtgagactgctctgccaattgcccacagctctgtctgatacagcgataacgaacttcgtgcatgtgagaccgtgcagatcacacaacgtctcaaggttgctcatgtctacatgtctactagcgaaatggctacacttcttcaagatggctacaagtatgaaaaccttgtgtattcagactgaatactgaataattcagtattcagtcttgccaagtctctctactcgtgcttgttgggctgaatggcccgtagtaatcgtgctgcttgctcctcgacgctcgacgctgggtcagacgctgaatctgcgcatgttgtggatacttgcgctggaactcggtagactgtaacatcaccggttgagtcccccacgacaagcaccggtgctttcggagcaaacgccaccgtcgtgcattcgagcggcacttcgaccatcgtcggggctgcagggaccgagctcgaagctgcattggggtctcgatacgtatcgtcgtccagtcggtcgctgtcgcctccacctttcggtgtcatttctctcgaagttccggcagcgtccaagccgtcagcatcagtcggtggaggcaccggagcagccacagcgatgaacttcttcgggaaatgacgaattatcgggtcgagtgtggactgagcgagatcccagagctcgatccgaccgtcctccgccacagcagcgaacactgcagcgtcacttggactccaggaagcacccaaaacggcctgggcaaggtccaccgagtggaacgtgagcactgcgtcgccgcgcggatctgcctggtgccacagcttgagactccaatcgcccgagcacgagaggaagaggtcgctgcagaagggagacacgagcagttggtacaccggaccggtgtgtccgatgtacgtctgcaggtactgctcgttgtacgacaccgaacacttgtgcacaagaccgtcttcagtgccaacgaagtaaacggaggggtcacctcgacttgcaaacgccagacaccgaccacttgcctgtcgtgagatgactccatctccaataccgcttgctcctgttgcagcggtccctgcacctccgagcagcggatttgtcgagcgcttgagtgtcatgaggtcgctgtagctcaagcccttcttcaggctccactcgaccactcgaccgtcactcgagacgctaaccacactctcacctcccccacgagccacccaccgcacttgccacacggcgtccaagtgcttgccacccattcctgagctagtagcaatgggcactggcacatacttcgcagttgggtcctccgcagcaccaggtacactgctacttggcgtcgagttcgaaggtccactagatgacgatgaatcggcctttcgagtgtcgtagatggacacaacgccgtccgcaaaacccaccgcgaggaggtacgggtgtgccgtgctgaagtcgatggatgtcacgcccactggtagatggtaaatccgctcaggatattcagggtttgtcagcgaccagaagagaaccagcccgtcgttcgactctccggtggatcctggtgtgctaccagctgcagcggcggctgctgctgcggattgagcagtttggccaggtcgaggagctgggctagcaggaacgactgatgcagcaccacccactgcgacactagaggcaccattcgcagcactgggagacgtaggtcctgccaactccgttggattcaaaggctccgcgcgcgcgtaagaaactgccagcaagtcttcattagctgtgttccaagcgagacacgagactgttcggtccttggtgagttcacagcggaatgcccatagttgctcgagctcttgcatggtcttagacccgcctgagaaggaatcggagcgtgtgggaaaccccattcccagtgcaggcaccacaggctctggcggactttcggccgtctcgaggatggggaaatctcggtatcgcacatgttgctggtggtagacattctgctggacggcacgctccacaacgttggcagtcaatagcagtgacgacgatcctagcacgtgagaagtgcgctggcgggcgataatctcaccgatgtccacgttggtgttggctcgagcgtagacgttgttggatttcgcgtcaccgcttcctccagggccgccgctaagaactccacgcgaagcatttgccacgctcatccctacttgggagttagtcgcagcactaccggagctcgcgccttcacctccagcaagagcggcgaagtcttgtgaagcgcccgcagacaaattgccagttctttgctccccaatcgccacagacgcattggaattcccggacaccgcagttgcaaccacggtagacctctgactgtcgaacatgcgcgacttctggctgaaaacattgctttggccatgtttatcgcgattttttcggttaggcttcgacgagtggtgctgcctggcgcgaaggtcctcgacaatatcgccgtccacatctagcacacagcctggagacgccaaggtagctccaacgatctcctccacttgttgcttgagctgtacatcacccactccgccagcgccacctccttccgctcccgaagccgctgctcctggtcccaaagtcgcatcattggggtctttcggctgtccttcagtagaagttccagttgattgcgtctgagcttgcgcttcggagcttggagcagattcaccgacgcccacctcgtccgtctcgttgttgttctcctcctccatcttggcgcagtcgtagatgtcccagtccgtcgccacacacgccacatctcgcgtggcggggggagccgtcatgacctccttcgccttctgcgcgagctgcagcgtctgcgctctcccctcgacgaacttctcactccccttcttctgcgcacacaccgcctgatagcgcttgttcctcgccgtgaccgccgtgtgattcggcgcgtcttgcgccacgcagacgctgcggatctccagcaacatctcggtcgacgtctccgccaacgtcaccgtgacaggcactcggcgagacctgccagacatcagtcccattgcgttggacgctgacttgcccccaacgagcaacggagccgcgcgatccacggcaagacccgaagccgctagaagtgggtctccaccctcgtccttgccgtcctcgcggtcttcaggatccgccgccccattcgacgcgcgtgaactgtcgtcctcttcctggttagacgttggcgttgcagaactcgagactgagcgatctccaccacttggtcgaacttctttgcggacgcctcgtgcagccgtggccaccaccgacgaggagctttcactgtccgagtcgttgtccgctgaagaggacgacgcgtggctgaagagcatactggcaccggccatggaggccccagcgaccgaggcaccgacaccgtggacggctttggtgcgactgcccttgccccctttgcctttggctttggggtcgtagcccccgcttggagtcgacggtttgatgcggctcacgagtaaagactgaggggtgacgtccacgccgtcgaggtacacgcgagtcgagtggcctgacccgtggcctgacgctcctccgttcacgttggcgacgctgccattgactcggcgactcgagttggacacggacgacgcgccgatgacccgagagcgaccgacatcacgcttgctggctcgaacttgcttcgtactgctgccgacggggatcttggcgcttgacggagacgccatgacggtaaaaaaaataatgcagtggtgcctcttagtgtccggatggtgaagcggcgcgaccgattgatccgtcgggggaagttaggccccggaacaggtttctttatttgcgcctgcgtagcttccttcgggtggtcgaagttggtaccgctcaagaagtttgatttccaatcgcccctgctgcgtcgccgacgcagcgccggacggcgttttgcttctcggaatttccaaacaccgcgttcatatcatcgacgagagaaacgctaacggtgtatcgcattgctccacgaattcctgtatcaacctcacgatcccgttgttcccctctgctgctgccatttgcagcgccgtcttgccctgggcgttgacagcgtcaacttgggctttattgctgaggagaagacgaaccacatccgtatggccgattcgtgcggcctgcatcagcggcgtccacatatccgagtccgcgagatccacagccgccccacagttcaagagcaaccgtgcgaccgaagcgtgtccgttctgagccgcaagcccgagggctgttgccccgaccacattttgaacattgaccttggctttatgctcgagtaaaatttgcaccacgccctcccgccctgtgaaggcagcccacatgagcggggtggaccctgtcttaccggggagatcgggagtcgcgtcatagtacagaagaagacgcaccacaccttcgtgaccttctcgagctgcgaagagcagaggagtccacccgctttcgtccttgatgtcgacgacttcgccccgctcgagtgccaatttgactaacgccacatctccgtgagctgctgcctgaagtagagaagtcttcgcgcccataccgatgaaatatcttagaggaacggcggcttgattgtgacggcaaaggcttaaatggtgatcctgcctggacctcgtgtgcgagtggaagatgctcctaatcttatgcccgagccagcactttccagctaagctcaaagcgcgacacaattaactttctccatctggcccacttttttttttcatagtaacccgcattgcctatattagcacgtcaaaagcgcagggcgaactgaacaactgcattccggcgagtcgaccaatacgctatctggatatttggaacgggtcgttgcttcggggtcgcagcaaactggaagatcaagcttagaacattgtcatccaagctgcagagcacctttcgagtgcgggtcttgtaagacattcgaaaagttttagtgcgttcgggcaaacacttcaccacgccttccacggggtggccggtgattatcaagaccgcagcgcgagtgcgacgcctgctccaaccgtcgatgatccatgaagtcgtgatcgcgagactgctgtactcgctacatgcactactaccccgcgcgacgtgcgtcagctgcaaggcagcgaccgaccgaccgacccatttttcaggtacgtatgctaaccctggaggccgggcacgtataccctcaagtgccccaaatcagtcgagacgacctcgtcggacttgtcgacggcgatgcacggctgaggagaacaaggaagaacattgcatggaagcttataatgcatcccaaatatgtgcccaaatcgccccaaatgtcccaaataatgaattgtctctgtaacatttaggtacatatttcgggccaagtacacgactgctttctcataaagctatcccaaatatgtaccaaaacggaggtgactgattagaggcgaagcttcggtctgggaggacagtgtagacttcctttgtgtgcctaaatttataaacgtggggtaggcaagaataatgtaacatgaaagttggtggcaagttttcaaaccctggtgtagcgcctttaaaaaaattgcgaagttgccgcgcaaaagacacgaaagaacttaaaggcgcgctcggccgggggcaaagcccccggccgaacgcgttgaggtcatgcattccagctatacaaatttacacaagaaggattcaatccgttagttgttatttcaatgattttgagtaaatgttagcttatatcgaaaaaatgctgctatcctagttatgatgttccgaataaatttcgtaaattcaagaactgctcactacagtgtgtggcacaccttctacgagcccgtaaagtgcccccccccccctaatacgagagccaaaaagtcgcacaaaatgggctccctcatggtaagtacgagatcaaggagccctggttcgggctccccattggctcccctccagggctccccaaatttggcttcaaatctatgacgggctcttcatagtaatatctgattggccaattttatctagacttaggcgagcaacttcgcgtgatcgatgcgccacggacggccaatcatcagcgagatatttaacacaggcgagggggggggggcttaacgagggctcacagttctggagggctcctttcacttaacctattgaactcaagagcccaggagcccgagctcgcgactttttgcaagagcccaggagctcggctctccccgggctcgtagaaggtgtggtgtgtggtacacgctacggatacggtcgacattctgggaacaaccagccacgaaacgtacaaactccttgatgttaccataatctgtggactatggactcaggcgacattcgccagttaaagttggggggggggggcggccgctgaaataaaattggttaggctgttcagccagctaaagctgtcctcccagtagtatggtctatatagtctatgggcgagggcgagcggacccgagcgcgagcctcactcaatacattcaataatcacccgcacccgccgattaggcgggggcgtgtctgtgcgagcgagcgaacacgagcgctgcaacccgatattttttttctagacaccgcgcctggccgagacgaggaactttgcgtaagggacaagggggtggggcaggccacgcagtcccgtcgctaagtccgcagacgagagccaacgcgcgagtgtccatgaaaccccttagtacttacacatcgcttcgttcgtgatggtgcaatgtactacaacgtaggtaggttcagcaacctactgacgttctaagaaaatgaatcctatccacttatatagtttatctcctctcttatctgcatattactaagagcgtagcaggatccacagaaccgatggggagtgtactgcaagtaagctggtgctggaaaagccgctccactgtggagcgatttatctataggagcgcttttccgtatgtggagtctccacatcaaaagtggtatcttgtttatgatccaatttgccaaaacaagccagcaccggccccttatacatcctcttgcaacaatcagaagtgcattaaacgcgcaatagttcaagcgttcttcatgcgtcgttgggatgcgatgcacttctataacttgtgcagtttcactctcgatctaacgcaaatactgactaatacggggtctcgtgcataccagggctcgcaaacggcgagaggcgggtacccgtgcccgcccagccagggtccccagctggagtcgggtacccgtacccgcccgaccacaagcctcgggtacccgagccgacccgactcacagtaaacaaaatgtagttcgtatgtgtgaagcacagccaagctggtcgtttgcaaaggcaataagtgaaatgcaactatgtagatgttagcccctattacgacgtctgtgcagcaattggcctaacttttagcgagatcgccatttgatcgaacgacgaggatatcattcagcacagacggcttcagcgagctccgatctttggtcatcaccattcctacatttgaaaagttggattctgacattgcagatgtcatacagtgggtagagcagtatgcactgcatactgctctactcactgttatcacacgatttggctctgcttccgtatgttctctggattttagatccagagtttctccggcgacgcgactcgacctaaacttactctagtacttaatacgtaccatgacctaaattacttcaaacctgcatttgcttagttatcgaacccaaagtaattgtgaaatcgaatgtacctgtgatcccagagggaattggcgacgtagaagcccaaagtgccgctactacctcttaaactccatcatgagtggtacatcagtttggttacgggcttagatcgagcttaaatacctcttataatacataaccgggatacaacgaaaaaaagccggtgatgttgcttgtggcggcacgggtaacattacaacccatcacccagaaaatgttgcttgaagcccatgggttaaattgaatactattatataacccacgggtgacggaacaatccgtacaaacgcgtacgcttttgtagaggtcgctcgaagctctcatttgttcgtggatccgtcgttatccctactttattcgctgctcgtactacagagtactacatggtagcactaccaggataacctaattcaatgtatcggtcagtacactcgtagatcttcggcaactcgtgagcaccctgagtgtatcgcctaagtattacgctagtaaagcgaagtattggcacaagcgaagtgttttcgtggagatcacccgtgtataaggttcattttaacagcccatgctctcaaatgcggcctagaagtcgctgttgctgcctgtgcagtcgatattggtacgcgaaataccttcaaagatgaacctaactatcgccacatcaaaagcactagctgctttaggtaagacactcgcgcgttggctctcgcctgcggacttagcgacggtccttcagggacccacctctctcttgctttgctcggggagcgccactgcgcggtctgttccatcccctcatgtgtctggattcaaagttaacttctacttagacgtaccctgcccggcccacgggctgaccattgcagacctccgcttcgcttcagttgcaaacagtctctctgaggcctcttagtgaaatagctaggtaccatcacatggcgatcatattatcagtgtacactgaagccgcaacctttagtgacgcagaagcaggtgtttttaccattgacctttttcatgtaaatatcactactgagtctatcatctagttcatgtaccatggtattgataatagtggatagctgctaggtagccgaggtaaatcaaccacttgagcgttgatttcgtagttttgctcatcaggttgccatcacttgcctaaggtgggtagcttgagtggtggctacagtagtgtgggaaaataggaaatctagggctccgcgaaggctgagataggaggtttttggtataatcgctttctattattatgagtttttttttttacgaaccacgggcatctcctgcgcctgcttcgcagccgcagcatctgcccggtaattcacctcaaaactgtagatacagtgataaaacgaaccttgctcgagatctgtttgtagcttgtagaaaatgaaaatgtttacctttgtataattctgcatcagttcgtccgcttcaatcattcactttacttcactccttactattcgatatatgtactgacccataccggttcaaactgcccacgcatataaaccttttggagggcatagtgcggcaccgcggccataccggtgtaatgggttttctaccagttcagcttgcccacgcatataaaccttttggagggtccagtgcggctccggagtcacatcggtttcaggacaatgtaccagttaggtgtcaagaggggtcaccttttgacttgacgtaccacggatataatcctgtttggtttgcgatagcagcactaacgttgcttcctatcccagtataacaccattattaattgggaaggctggtgagttggaaaggctattcaatatattgcattttgcttaaatctggtctccatgctacagtagaaaataagcattcaaatccaaatcattataagtggttttgatattgccacggttgaccattgaacactcgtggatgtcgtagctgtctcgaggatatgctctaaaaccaatttggttaagtatgtccgtatgtagggtacagggggggggttgagaaggtaagatactacatttgttgatcgttagtacctagctctaaatgaacacaatatacctcaccatgaaaatgaaataagatactacatttgccaaagcaatgcaccctctagcaaccggtgcgagaattcgctgtgaggatgctgctatactagtatattgttacattctgatcggaaagccaaatttatcgatttaaatgtggctttttgctttttagggtagtccacacaaaggtagcatccatccaaactatcactgcagtcgcggtatatatctgaagtgtactgcagtctcaccttctctttgtatctgaacattcgtttgtcgatatagttgaagaaacatgttaagcaggagttactttacggataaaacatactaccagggattccaatcggtcctaactacagaacaggccaataataagtcattcgggtgaatgtcgtccgaagcagactgtgtattcaatatctttgcataaaggttagatagcagcagctgacgcgtgcgactggtgcgcctcgggtgtgatgcgaacgatcggacttacttttactttcctttttttcacgaaatagctatactgaaaaaaaaccctggtcaagtgcaccaacatagtaaacaaacattacaaaagctgaagagaatccagagcttccccgtgtaaagcacggcattagtttgtgaatagcaaacgtatagcaccaccagcctggttgaagcagcgacaccacgtaggtgtacctgtattatggagctaaggaactcctgcattcgatttgtgtgttgctatgtgttgctattttctgcttcttctgcatcagcaatgcatgtacgcggtactgtagcgtattgatttgatgtacactgcgtagccaattaattatccctatcgagaacaacaccagtgacggcgaaacggatccggcattagccaaagcttcagcccgcattgctgatcctgctttggctggagtgacttttgttgccattccacgagggacggctatgtcgtcgcatgaaggggttgaagacgaaggggtctctgacagccatctgcgtggcgctgaggtcccggtcgaggctggacgggttgattttctgtcgtccttggttctcgagactgatgatttagcggagcctgggcctgcgatacagcaagatggagagcgaccacctgctcgccatcggaagagcgaggtaatgatggactcggcgagagcgtcaatcatgatggcgcgatcttcagggagcacgtggccggtggaatcaacgcatgaacctcgaaaatctgtcgccaataccgtcgctacagaagtggccacgttcttcgacgtgtttggtctgttagggatccctatgatcattgtgttcctcctgtcagccgcctggacgttcatgctcgcagtgattcaagtccacgcagactccatggccaacacgatcatgaacacgactgagttcgacaacggaaacttctggctactccccaaaccagacgcggcgatagttgtttcttcgactgtgattcttgcactgtttggggttggctacactggcctggtggtgattatgctgttctgctatcggggcggaagcacgaacaaggacagccaccaaccacctgctgctgctccttccactgcagttgtcagcgcgcccccagcaaatgtttcgaatgaatcgggtaggaaaaatcatttcaagttttaatcgcttgggcccgtgatttgccggttgagatccgccagcattactacgtaagtgatcttgcaaaaaattcagccagcccgtcgtgttcattgtggaaggttgagctaaatgaacctgttgatctgagttgcattcatgttgtagacggctgccctcgatctcccaaaacttattttccagaccatcacgcgtttcacgtacctggaaaaaagcttcccgctcccgatcatttacacttactcggttctgttgctctgtaactggctcatggtgagctatcgaaaccaacgctacgttgcggacccagctttggtcattgctcggctttactacacgtacgttgttgcgaaatggtctgcttgccttcctggaaacttacatagttgttttgcacagcttcgacttgttttttgcagtgttcgcaccgctcgtggtgctggtctcttcattaattcattccagttcgaccgagctgcgtttcttacgaaaacagagacgatcagcgcgggtacattcgacactgtcgcccgcctctttggggatccatcgcagatttcaagtttctgcaaagctttccactacttgcaattctcttcgcgctcaacttgctgtcgctgtacaagtggagaaagataatattcacgctgattcataaccaccacgagcggcaactggagcgaaagagaaaagccttggtgggaccgactctaagatgtgcgtctgacactgcaagcttcagagcctctgtgaaaaagaaatttgtggtatcaaagccgaaatttgagaagcatttcgtgctcaaggtcgtgctctcgctatttttcttcctcgctggagtcggcaacttcgtgtactcaattggcgccatcgagtcaacgaacgacttgtgcagcagctacagcaagtgcgtcgtgcggagctaccactggaattacggcgaagagcactgcacgtgccttgtgtttgctgaccggcagactgcacctgccacctacgcagagtggacgaatcctgaggacactattggtgatctcgcggctatggctatggcgggacaactgcgaatcattcagattatcaaccatgctcttccagagctaccggaagagttaaggagatgccaccacctcgaacagctcattctggcctacacaaagactgaagtcctaccagaatggatgtcggaattctcgcacctgaaatacatgtaagtgtcatcgttctagcttagagagaagggggtgctgtactcattttttatatgggatatgtataaccacatcgagggggattttacaagcagaagactcacagctatccctgacggcatcttcgacaacatgccgcatttgaccttcctgcgcctaggaggtattccaaacgtgaccagcctcccgtctctctcgtccctcacgagcttgcgctatctgactctggctgtgttggattccctaccggagataccaagtttcgagggactctcagcagtcagcgacctgaatattgtcaatgcgccgcttatcacgacgctgccgtccctggcaccgcttgtgagcctaacgtcgctaggaattcgacccaagagtggaatttgctgcaacggattcatgtcgggcacgtgcgaccttacgctggcgcagtgtttgccagtagcgagcgataagtttacgatgagctgcaccgatgagcgcatttcagataaagacaaggctgttgtcgactcgttcgggagctccatctgccctaacagcgcagccgtcgatcgagaggctactgctcctagcaagtacacgactgatgagctctgcggtggcgtgttgtacaagaactgcactctcgacggggaacagggcatctgctacaacacccgcatgatggttgttaattgcgagacgacgtccggctacgtagcaatgcgaaagctccagattgaacgaggtgttggagacccatgcgacccagacgtggaggcatggctcggatgcgcagcatgaacaacggggttaataaggagtgattaaaatttaactattcctctatccaggacaatttgtctactcattcgaacgattcactgttgttagttttgctagttcgtttacgtagctaagtgatgaatgaggaacaatcgcactcactcactgtcacttcgcatgaagttgaaaaccgggagacgcgctgtccgtttccgcccgttgtttgcttaaatttaggggcgaagccatccgaggttgctgaggctcagcaatgtaggagctgttactggcagcctaccattcttcaatttgttttcgactgaccaactcgtgaccacagaaaactgtccactagcgtcccaagccggcaatgacagacagtaacccggcgacttctgccgtcggagttggcagcgtcaagtgttcgggagaaggaagccacgaagttccatggacggatcgcctggccgctctcggaaacctctcgcagttcgtcattttcgcatcgatgctgatgtacgccttcggccatctcttcttcttctcggacgggtacaccacgaatgtgagcgtgacgatcggcaactggtacggatatccgaccgaggaaacggaccacgaggagatgattttacctacgttcttcttcttgctctgcttcctccccatggcggtggcgattctcctgttcgaactcctccgtcactttaacgtgcgacgcatcgcgtccagccacgtcttgaaattgactagaattcttcgcctcaagcctcggatcatggggcgcgtgcttcacaagagcttcggcgagttcctcttcctcggttttgtcattgggggcaacgtctacgtgttccagtatttctaccgagacaacatcgctccgtacgaggacttcagttctagtgtggacacgaccacgtacttgcagactatcgcgctcacgttcggctacgtctgcatctacaacatggcgttcctcttcctcccggccacgcgcaactgcgtctggatggaattcctcaacatttcctacgcgaacggagtccggtatcaccgctggttcgggatcctcactattctgacggctttgttgcattgtacggggttctactggtcgtggatccgagagggaacgtgggtggaggacgccctaccgtgcttcaggaactgcaaagtcggtgaggatggcaagtatcgctggacaaacacgttcggtacgattgcgttgctctgcttcttggctattggagtcacgtccgtggggagaatccgccgcaagatgtacgaggcattctactacgtgcaccacctctttatcatcgccaccatcttcgtcgttctccactggaactcgacactcgcgtggctgttcccttccgtcatggtttacgcagcaagccgcgcactttccgtttcgaatgcactcactccagtctcagttcgcgagtttactacgctctcgaacgacgtcattaagatcgtgctggagcgttcatcgacccgcgccggcgagttcaaggtcggcaacttcgtctacttgaacgtgccggctacctccaagttgcagtggcacccgttcaccatcagctcgtcgcctaaagccagccccgaaacactcacgattctgctcaagtcgctgggtgactggacgcaagagcttgtcaagtattcggacgaatgcaagaagaacaacgtgctaccgacaatttacatggacggctactacggcgcatcgttggagctgtacgtcgaatacgcgactgtgtgtctcgttggcggcggaatcggcgtcaccccgctgctggcgatcttggaggacctggtagcgaagctgcgtcagagcaaagctccgaagcagaaggtgttcttcatcttcacattccgtgagttgtcactgctggaggagatccacccgcttttgatgcagatcaaggagctcgacccgcagcaacagtacttcagtctgcacttcagcctcactcgacccccgaccgacgaccagctcgactaccaaatcgaccacagccggctgtcggggaagccccacgtctccgctgctagctacgacacctcctctacgaagaaaaccccggtaccgtttgcagagccgcttcgatctccgattagccgcgtggtcgtctacactgcgtcgttcttcttgacgctgctactgtggatcgtcgtcaagttcggcaacaagatccaagtggacgacggtaatctgtggccgctgcagaacttcgtggagatcatcctcgtcatcctcgtggcgctgctgggattcctcgtgttctcgttcatcgaggacaaaaagaagcagaaatctgcgggtactacgtctaggcaaactgtgaccccgggaggagtgggaaacccctacactagcgacgtccacacgctccgagacctccttgccgaacaccacgtggaagtcggccaccgccccaatatggacgagctcgtgcggaaagcactcgacgaacacaaacttttcacctctacccacccggaaactgagacaaagggcaactcgaccattggagtcttcatctctggaccaaaagcgctcaaggactccaccgcgactgccatcgccgacattggggctctcaactttgatatccacgaggaagaatttaaactataaacgagggtaaattacgactcggatgtatttttcacgcactatatctacttaagtacgcactaagtacacactaagtacgaacaccacccctcacttgagcctcacattgctggactattgcttgacaatgcgccgagtcctcttcagtccgcgtgctcgccaagcagcagcaactgctgcgctccggagtctgccgccagcgcgcaccgccaacactgggggcgtcttggctcgtaccttcgccagtgcgtcaccagtgctgaagcagggtccgcctagatggcgcgcgccgacgttgctggccctgaccttcggggcgtaccagctctacaaggtgagggtttaccgatacactttgttgaccagcattgaaaaatattattcttagccgtaatttacgcctgaagtagacgttcgaggaggagccgataccaggggccaaggagcaagaacgactgctcaatctggcccacgagagcgcgacgaaggtaaattacggcatccaaagtgcaaggtatctatctatttgagagacgaaaattacactcacatccttttattttacttactatgatagggagaccgggagctagcggcgaagtacgttactgaagcatatgaagcgtctaagggcgctgtgagctcacctggtattactttggcatgggggtttctgttactgaggtcaaaattaattaaattttcctgtctgttgtgtactaatgcagctggcgcggccgtgcaggcgggtaagtacggcgaaatatgtgagaagattgggctgaactcttcagcgttgctatggcaatgaagcatggcaagacggtggagccgcctgtcctccgctacctactcggcatcaaaatcatgtacaaaaggggccagtgctacctccacctgtacgtctttgtgggattattttgggtgtattgtggtactgaagtttttgcgttcgtgttctacttacagcgagcaatacgaaaatgctgagaaagtattactgaaggccatccgtggctacgagaagttccaaggtcagttctcgctctcgcagtgttcacccccagatgtagaaatactggacgagctcgaagagtcggtgttcggcttatttgctgcctacaccattctgctgataataacggaccgtcagaacgagattccttccctccgcgagcgcttacttcgggttgtgcgcaactcggagaccctccgggagggggaaacagaggtcatggaccagttcgatgatggcgcagcacttattgcgatacaggaggaacgccgtcgcaagcgccaaggagaatcgggggaggtgaaaagccattcggcttaagagggcggcgtagagaacgtggcgtcgaagtcgcgtgctgttggataatggaggtctcgtttctggaagtaccgatggggatggttttctccagcgccgctcttctttgtatttcgttcaagtgcactcactcacttggatgcaagctgaaatgtttatgcggaaaactacatcgattgcctcctgagacgctaatttcctgaatctttcaaattgtggagacgttttggtatggcaataacacaattaacacttgcaagaatgtgtcaaagctcattcgcaccacggtgaaatcctggacgacactgaggttcgcgctactgacatcaatggcgagggctcccgacgtcgcgttgtacgtgaactccaagtcgccaccggccggagtcgccgtcacacgagaaggaccctccgagacgcccagcaccacgacattcgcaatggcgtccgtgaaatcttctccgttgtagttgttctgcgccaccttgttgctcaacgccgcgccggagacgctgaattcgacgatcgtcgactgctcgtccccgttcaccgcctcgatgtcgtcctggtacagcacgccgcttgcacttccgttggcagatagcgccaccaacaagtcgtacgacgagttgcgcgctgtcgtgctggtgagcgcggcctggtgcatcggcaacacggagccgccgcggacgagcacgggcatgtcgtagagactgacgttccacgccaccgcggcgccggtcgactccatcttggagtagtcgaagaggtcgtaccagacgcccaacggaacgtaccccgtgacgttggtggcgccctcggtgagcacgggcacgaccagcagcgagctaccgagcatgaactggttgtccacgtacggcgaggcgcgcgcgttggcgtcgcccgggaactcgaagaaaagcgcgcacgcgatcggcagtcccgtcgcgtgggcctcgtagcccagtgtgtacaggtacggcagcaggcggtagcgcatgccgatgaacttgcggccaatctcagcgaccgagtcccagacgtacgtctcctgcgggttggcgcccttgacgttgtggttacacgcgaaggggtagaaggcgcccagcgtgcgcccagctcctccatcgtgttatcggcgaagccgcagatgtcagcgcccaccatggggacgccgtacatgccgaagttgaggatggtggggatcgaccactgcaggtcgttccaagtggccgcgttgtcgcccgtccagtgcgccgtgtgggcgcccgagcccacgaaggtcgagcgcgagagcacgaaagcgcgcttgttgagcacggactcgagcgccgcgttggtggcgatggcctcagtgaagccgtacaggttgtgcgcgtcgtactgcagcacgccgccgtactgctgcgcgctcgcggacacggtcttgtagttgatggccgtctggtctccgtcgttgttgatggcgaacagaggcgagttccactcgctctcgtcgtccgcgcacacgaggcagcacgtggtctgtgagctggcgttggggcacgtgacgtcgaacgagcttaatctcgagtaaaattggcgataccaagagtaacacaccaaaaagaggcactacttccggtagtaaactccaggatctaaaacacactgcacgaactcttgagggcctgtttcaagccatacagccctttgagaagatgacacactctgccggtcccgtcgtcgtaaccctgcggctgctccatgtatctgccagctcgccgttcaagaacgcattcagaaaatcaatgtgtcggcagtcgagcccctgcatcaaacaactaaagccgagatacgagtattcagaaattgggtacgaatgaagtattgctaacaacgaagaactgtgaataaaatgtaacgaaacgtgtattgttgtctacgaaaatggatcgtaggactcgatatgcaaaatgaaaaaaatgctagctacaacctagcacgttcgagttgttctcgccagccattgatcgccttaataggccacggctccagcaacatctgcaccatgggtgtaggccctgttaagacactcggctaactcttggcactccagcttgacttgcgcaccgttggaaaacttcgtcatccagaagaagacgccgttggtctccccccacgagatcacctttcccaacagaaactgctccacctcactaccggagtcatcgggaattttgaattccttcatgaggttccaatgtaggggtctggtagggtacttcaagaactctcgaatcagcacgtcgacggagaatcggtgagtgttgtctccgccttctgtgagcggacccacgcgcttgcgctgcccaccacttagctttctcgttggcaacgcctttagcatcccttgaatgctgatctccttctgcaatgtcatggcagcgtcgacatgggagcattgccaccctgtttgataacacacatacttcttccgaatcgcctgaatctaaaaccgcagtgacagtgtcagattcaaatcgcctaagtgtgctactaccacatatcaaactgaacgtactgtttgggaggggattgatggtgcagccgttatcattccaccatcgagcagtggatctctgctcagtaatcgaacttggtgaatggacaagcagtgcaattccaccaggtttacagtcatccctggcggtagtttgccgttgatggagttcctgtagctgccaaaatgaaacaaataaatagtgagcttaacaactttgactcgcacagctgtaatactcacattgtggcacggtcgcggttcaaaacagcactatgaatgttcttgggcgataccacgaacttggaagcgttaaacaagaacgccttcacaaacttcgcccgtgtgtccttgatcatgtagtgattagacttctcttggacaagcgtttgcgcgcgcgctactacaccactcatgaacggacctagaatgcacgagatacacgaataataaaatcaatcggtacacaccattagcaaaggataaacaaacgtcatcttaccttccgagaagtggtttagagcaaggcaagccggctcgctttcttggagaccaagaatacgaggaattgagtcgttcaagacgaccgatgtacttgcccgaagcgtcccgacacacaccttcttgatcacgcggtgatgagcctcaagggcattctgggacggtgtaatgcctgcggcggcggcgacgtagaaccagttcccccacgtgtcacccaagtaaatgtcctcgaaccacttggcgtagtctcgctcgttttgttgtatccaaaactcgaaaaagagtttactgagcgccttgaactgcttggccgagcgagttttactgagatagcgaatgtccggtagcacgttgtcttcgtagaacgcagggtccttgagtagcttgatcttctctcgacttttccgcacgaggtgcgggtagcaattaaggagaattacatcaggtcaaacctccttaaaagcgttcgcaatgccttgggtactatcgaggctgccataggcaagggctaaatcgactccgaaaaacagtcgggtaaagtgcttggcagtccgaaaaagcgttgcgtacgccgtctgatgttatgtcttgacaaacatatacatccaagggacaaatgttttggagtactgttttcgcgaatagtgcgtcgtgtaggtcccaaagtctacgagggtccatccatctacaaaaaaaagagaaaacggtcagctaatgcaccttgccacgactagtaacacacctcgaagcttaccgaaatgcagtttatatgttccatccgtagcacccaagacgccaatattctggtggcattcgtaggccttgggaatgttcaggagcatgtgacgcgaagtcaatataagcccgaaagactttgctgccttgccatcctggtcaatgaagtcgtgttcaaagcactcaagaacgatcacaccgtgctgaaactggcgggacttgttggcaaactgcgttgcggcgtccgcagcgctgatgtcgtcttcgtgaccaaagaagtcactcttcgatgtactcaaatgtgtgtacgcccactctagtagagtcgcgaagttgtgaatctcccacccacctgtggcagaaccaaatgcaagacaaccacaattgttcaaaattattactatcaacccaaaataaagtacagagctgccaaaaacatcatacctgactgtttcttccggagtccagcttttcggttcttgagctgactttccgtgggtaaatgctgaagcatgactgggttgtctccgtgacgatctagcagcagcttccggcacttctttggtccagcgccgccgaacataatgctgtcgatctctcgcttcagcgcaccgtgaattccacggcgctgagtgtcttgatcttcgtctccatgcatgtctgtctcctccaaaacaaactgagctccgctttcgtcctgggcttcgccttccaccttagacagccgcagccgtttggggcaattaacatgggacatgcagcagtagatacgagtaccgttgccagcattgccgtagttgtgtttgtacttgtagtggaacccgtctaagacgtcgatgccaatctgcgcctcttcaagggttgggaacacctcgcacacaacgaacgctctacgagtcgctctgacttgctgcccctcttcgtccgaagacgaggcaaagtcgctgccgcttgcctcgtcggctctgctcatgttgagcgaaaacggacgaatggtcaggagcttactctgatcgtctcggttcgggtaacatatccggctttgtaaactcttactctagatctcacctgttttgactttacgcgtacccccgccgtgatttactccaggataagccgccaccacgtgacgttgaggccgttgcagaagttggagagctcgttcatgtcgatccagatgccgtcgtacgccatgagcgcgtgcatgcgcgtgaactgctcggcccagtagctctcggcctgcgggtggaagaagtcggggaagtacgtcgggcccggccacacttggcccaggtacggcgcgccgtcgctgtccttcatgaagatgtccatctcgaggccgcgcgtgtacgcgtccaggtcgtcatcgtcggggatgccggggtcgacgatgggcacgaacttctggtcggcgacgtggatctccgccagcagctcggtcatgtcggcctcggggaagttcaccgggtccagcgtgaagtcttcgtagtcgtgcatgtagtcgatgtcggcccacatgacgtcgagcgggatctcgtgcgccttgtactggcgcaccacctcgcgcagcgccgcgctcgagttgtagccgtagcggcaatggtggaagccgaaggaccagtacggcatcagcttcggacgcccgatcagagtcgtgtactgtgagacaacgcccgctggcgacggccgcgatgatgtggaagtcgaggattccgccgatggtctggtacacgaccttgtcgtcctcgagggtcatgtccatgccgttgctgttcagtagcagcacgccgtgcgcgtggccgtcgccgttgacccccatgaagaacgggtgcgagccgtacagattcacgttgacgttcgcggatccttggtctcgagcccacagcgtgcgcttgtcgcccgactggacgcgcaggtgagtctgcgtcgtctcgccgaagccgaacacgttgacgtcgctgctcacagccgtcgccacttgcacgtacttgtccttgatgaccagtgacagcgccgaggagtcgaagagcaagtagccgtccgccttgcgcgtcacttggaacgtgaaggggctcgacgtgtacgtgaaggtcgtggtcgagtcactagcagaccagcagacaccgtcagtggaggtgttgcgcccttcgagtacagactgaacggaacctgccagcgctcgcctgcgtcgtccgcaaccttgacgcgcaccgcatcgttggagctcttggtcacctcaaccacgagggcgtcgatgtcgtctccgtacgtggcgttggccacggtcgagtttcgcgtgagttggagcttgagcgccgtcccgctgtcgtcgacgttggaaacgaagtagccggacgtcgtgaggtaggacgtttcgataaccgcagcttggacgccgctgctgaagtggcaggtagctgcaagtgcgatcagcaggaagcgcatcggtcggaactggcgcattgttgatgacagctacgccttcttcaaagtcttggatcgaagtcaagaaggagctcgaagcttatggggcacgcagtaaattcccgaatgagcaaattgagccgagtcgagttggcgtgatcgggtgttcgcattggcaatgaggacctcgtgttaacctcattatgagactgccaacactcaatcgagtatgtactcgtggacaactggtgtcgcattgtgcattgatattcgaagggcagctgaataaaaaagcttgatgatggaataacgcaagactccagtacttgatttatttggagggatcgacgacgctgtggcacagcggctgtgctcggcaagttgcttgttgccgtgggccagtcgccgggtcagtcgccgggtcaatgctccgcgaatgagtcaactactctcaaagacaggtcaaagttcaatcatggcactctgtggcggtaccagctgtcggcaatgagtatatctatctacgggtgctctgtgagcgtaattcctgtgagcttctaatggacccgcctccgccgtgctccaagcagaagcagtgagcctcagtggctcgtgaggccatactaagtacggaaaaagagagccaacttcaaccagatcccatcgatccaagcagatcgtcacttttcacgtgcggaacaggctcttcgaatcgctgcttggtaccgcgacgcgttgatgaactggctggccagcaaggaaacgtatgtaggagaaaggagctaccggtagcactattaggaatagcgcaccccagcatttatctgtaccgagttcgacaacggcaacaagctttttatgcttaagacataccgatccttggtcgattggcttatccttggtgagatcctctcaggtttgatcactgtactcttttggcacttctatcctatgcctttgtctccttggagctgccttttggagttgacaaattaccctggcacttgatttcgaggaattgacaactttcaacgtcccacgtcccagagctttggttgattggtgctcgactgttcaagcatcgacgatcttattaggacattctgatgcggtacatttaagtgataataactgaagtttctgtttgtgctagcaatatcccatacattgaccgcccttcgattcccaccgagccattacccgtcatcgtgttttttttccttctcgatatcgttatcccgttgtagttttttgtaagtgattcgtcagaaagatatcgtgtaccgcccactggcacgtgtcctggacgtcctatcgttaaggtctcaatgtgcttaccggtatgaacagtagcggactgtagcatctgtttgaacatgcgcattgagctgtgggacattgaaagttgtcaattgctcgataaatcaagtggcgaaacgaaggtgaatctgtcaactccagaggcgcctccaaggagacgaaagcatagaagtgccgaaagaatattatcgcagcggtcacacctgagacgatctccccaaggataacctaatgatcaatatttggagctagttgccaactagtagttggcgtacctagtcgctttcgactggaaagcggtatgctctaatcttaataacgctacagtagcccctttctccagtggagaatctccaccatgcatgcgtcttcctgcatgaaaagtgacgatctgcttgggtcgatgggatctggttgaagttggcccctctttttcagtatggcctcacgagccactggtgctcacgataccagtgcttgctgcttctgcttggagcatgatgggcgcggcccgcgcccaccggggtccatgagaagcttacaggaattaccctcgctgagcatgcgtggatacttgcgtacatgtaccgccatcgacgctacgagatgctggacgaccagtatcttctgtgccggcaggctggtaccgccgcacagggtgccatgattgaactttgacctgtctttgagaagctgactcatgagatagcggagcattggcctggccacttactggcccacggcaacaagcaacttcttgccgagcgcgcgggggatagagttgtcgatccctccgaataaatcaagtgccgagtcttgtgtgttagttagctgtaaattcgaaactccaaccacaacagcagcgtcttgagcttgttgcggtctccgctgcgagcacccagtcaaccttgagtttcctcagcgtctgggctgcagttgggaggcatatcggactctagttgcatgattgcttgagcgctcaaccgcctcgcgagtactttcaatgacaccgttttctgctcttcgggtggtgtcgacaactccgccacggccacctccagttgctcgatgctgtcgctatgcttctcgtgagctttctcacggggcgtcggcgatccactgcgcgagtggaaactgtgcaccacatcgtcagcaggctccgcgcgcgcagtgatgaggcccatcgctgccttgagctgtctacgagccccatcccggcttttgaggtacagatctctgacctccagcgtgtccactttgctcaacttggacaataactccatcgccgagcggtagatgtacgagcatggcaactgggcgtcaatgcgctccgcgttcttgccgatttcctcaatgtctagcagcgttggggccgcatttgagcccaacgccggccctttctgcttgctcgagcgcttagccccgtgcgctcggacgcaccgcagagcttcctcaacaacggagcggcatcgaacagattcagacgggtgagtcgtccaagcgagcttgttgcgagcacgatactcaggatactccagtagtagatgctcgtaaggttcatggtcaaggcggtaaagctccgtcacacagagcgcgacgcacgtctccagccgagagataccgtacagcaacgccagctctccgatgaactcgcctctttcccgcacactctcgctcgactccatcttgacgccaacgcggccattagcgatgaagtacatactacggtccatgtcgccgatcacaaacacctcctcgttctcggaacacaccacgtactgcaggcagaccagaagtgctctcacgaactggtcatcgagagagcgaaaagctcggacctgcaccgcaaagctactcagcgtggtcaacactacgtcttcgtagagagggcgggacactttctccaccgcagcaaactcggcttcacctttgcgacgacgccacagacgcgtgtagtacgcctttacctgtcgcttgagcactttgggcacctcgttctggaccaagtagttctgcagctcacccagtgtctgctcaaacgcagcctcgcggcgagctcgagagtcgagcagttcgccctgcgcccccacgagagctccgtagatgtagatgctcaacaggcttattgcaatctctgcgaccaattcaagtgggttcatggatagaatctctccattgaatagggacgagatactctccatcgcgacgagcagcgaccggagatacttgcgtccaagcgggacgctctgaaaatcgaggccagccgagaccccacgaagtctccgctcggtctgctccgttccagagctggcgtccgtcagcacccccgagttaaatagccacgatgatccgtagagatcgtaactaatatcgctcgtaatatacctaacgcaggccagcaaatggcctatcgtaagataggacagcagccccctcagaaagtagaggaacccctcgttcaatgggatcttccgctcgtagatgacgaattggaacagtttgtccgtcagcgattcgatccgacccgcgagtaggacacggttcatacgcagcaaccagcgggttgtccaccacgaagcatcggctgggtctactgacaaatcaagtacctgcggtactcgcacatcagcggcaaagagcagtatctccaggggaagtattgccacaatatcgctgcgcaagactggatccgagagaatcgatccttgttgcccatcttttgtagaggttttgatggtgttctcgccctcggttgtaaagctgaagtggattttgtaggccacatcagcagcgcacagtaaatccaagaaaatctcaaccccggaccacccacgcagggcgctatccggtagctccgttagtccacgccaaaagcacactttgaacggggtgatgaccaagtggtagattgcgatcaaaagcataacgaggtcccaaactttccccatctgcttgaccgtcttgataaactccttggccttgagatctctcgtggcagcacgggaaagccggagccgtaaccccacgctagcagaccgatttccaatggccgagtcacgcgacgatggaatcgcatcatttaagaggcgagttgtgggctgatgcttaggtagaacactcgaccgactgcgatccctccacagccgatacctgttgaacagcagtagtcgtgtagagtattcggggcgctgacagcgctgcagcatctcaaagtcaacgcccgtcggggtgctgcgcatcaccacgcgtccgtcctcttctcgcctcagtttctcgaaaaacgcacgcccaaagttcggcagcgaacggcatcgcaccatgcgtcctagtctttttgctcgctccgactggactggctctgattcgtgctgatccttgttcatttgctgcgagaatgaaaaccggcggctgcgcgctccaatgccgttgtcctgtggtaattgagcgcccagctttggagcagcggcatctcgagtcttcaacttcttcacggattctggagtagcttgatgacgctgcacgtcttgccttcgattgacatgctcgtcgaagcgaaatgatcgcgctcgaagcagcttgttgcgagctggattaatcttgacttggggttgctgcgcactcgacccagctgcgggtcttgataaaacaataggtgtttctgttggtgccagctcttccaggagcttgcaaacgccgtactgcgctgacgcgagaagcttgtatcgtacccagcactccatctcaatgctgcgaagatgttcgtcggataaactgtcccgcaagtgcttgttgaccggactggtgtcgaccatgaactgcatgatgcgaatgtcaagacacgagctgctactgctgtggatcaacggggcgaccgtgtccccaatcatgctgcgatacatcccgctcgagttagctctacttttgctcgagtgtgtgacgctggtacgaacgctccgacccgagaccactgaggaagaacgacgagaaatttgcatcgcagcaatggcaggatgaaacttcttggcacacttctcggtcttcgcctgaatgtacctggttttcttctccaggagctgtatttcagacgcgatggaggcgcgtctggtttccgctggcacggccaatgctggtggagcgagcttgggcggggcaagagccccgctgctatcatggccgtggttcagcaacacagccgagagccgcgtcttggccttgattgttcctgaagccgctgtggccgctgtgtgaagtcgagttggtacatgacgagtcgcaagcagcaacttgaccttatgggcggcacgcagactagctcgctgatagcggagcaagcgggcgtgaacccagtcgaggatcgcgtgcagcgagtgcttttgcacctgaatgtcggatgggtccccggtggtcgtccacagttcttgccagtcatgcttaataatgtacaaaacttcgcaggaggttgtcgctctgaccgtcgctagacgtcgctgggccgagaggaagaaggcgacttcgccaaacacagcgttctccatgagcacggccacactcgtcactgagctcgtccaaaacaccgctgctagccctttacgcaggatgcacagtcgactaccaaacgtgccttcgactaggatattatccccgggaatgaacagctcggattgcaaacgcagcgccaggttgttgacctggggcggcgtcagaaagcggctgatcggaagcaacgcaatggcgtggccgtaaacttcaagcataaacttgagctggaggttcgccgagagatcgtgcatcgtaccatggacgttgaggtcctctgattgctgaaattgcagcttgaagaagaaccccactcttttgcataatccctctggtagttcttgctccttcgcgaagtcatcgaagctggcaatgcggctcttgtactccttcgcttccttgccaagttcctgaatcagttcggaaatttctcccacgatgtgaccgatgatgtacgtacaacacaagcacgtgaagctggcccaaagcgtcccagcagcgtcgcgcggaacactgtcacgtgtccccaccagcaatagcgtcgtaatggcccaattgaaggacttggcgtaaagcatcggtaccgaataattgtattgtttcagcaacggatcttgcgccatccagcatttctccagatgatcgcactcttgttcagatattaagaaaaatatgcagccgacatagtgcgccacaagtaacataacgatcatcagcttggcagggctcaagtaagccgagacgttatgcgtcgcaaagtgctgctggatctgcacgatcacatcgtccaggtactcccacagatccacgcaccgaacgagcctcggcaatcgacagagactggggaccaatgccgcactttggaatggagtgtacaacggtaaggaggcgacaacatcccacttaaacgtcgagctccgaagatactgcctgtcgatctcgcttcgcgagaccagattctccaaattggcctcagagcacccgaagtagaagagccgcaggtacatgtcaagcaagaaacacacgtcacaactgagatcggcgatccagacagcggcattggcgctactagagaaatgaaagtgcgagtggaagcaaatgcggaggatgataaacaccgcgttgtacgtattccagaaagtgatgatcgcattccagacacttttgatcaagctgcgcgtttcgtagggatctcgcgtggttttcttctggcccccacctccaatgctagtagtgctcgttacggtcacttcgccctggtaaaacagcgtagcagtcgacatcagatgcggttgcagtttaagtttctcgaggttgtggatgatacgtcgcataccagcctgttgctcggcccagagctcttgcgcttcctcccgcatatcgcgtaaatcgtcttcgaacttgcgttggatgacgtcaaactgctcccgagtcatgacggatgcatggacaatcgaggctgctatgagggtggcggggtgtgcacacctgagcagaaacgcgtttactccgtagcagtcaccctcgtgaagagcgcgaatgggtacctttcgagaacggaagaacacgttgactttgcttccatgcagaagcaccatgaactcgcgacaaacgtctccttcgagacaaattgtatctccattttgatagcttcgatgacgaaattttcccgtaacttcttttaggaattcaatactggccgaatcaaagagcgcgacactttttacagcttcagagtgcaacaacgacgagatttcgtagcaaagctggtccggaaggttcgacagcaactgcgactcgtacgctttcttgcgctccgtgaattcgtggtgataaaatcgtcgaatctcagcactcaacttctcagaaatatccttgcgttggagaatgccgttgacagtattgatcttctcgatgtggcggcggtgaggagccattgcattcgagatagtgttggatatcgcgcccatgatgccgaaattaatgattccgctaacaaaaatccaaaacgccgcgaaaaaactctcggatgtcgagtaagccataatatctccatagcccacagccgtgagcgtgactattgcccagtacaccgagcgcatgtacgcaaaagatgcctggtacgatgacgctgaatcctgtgcgggaaacacgtcgccgatgtgggcgtaacagtcaaacataacccacgaacaattctcgaagagcgtggcgtattcgaggcagtcgagccgagtcatctccgccattccatgctcgactgctttatctaacaccgtcaagtttgagagtctagccatttcaaaccacacacatcccacaacgtgaagcataaatgtgactccaagcagcagcgaaatgacaagatgggtcttggagctcaagccgtaaaagtcgcagacgttccacagtaggcgcggggcttctcgtaggcgcagcaagcgaagaaagcgaaagaaccacaaatagccttgtcctgaattcgtagtttgagcctccaacacaacgacaaccggcagccaggcagttaaatccgggtagaatccatcacctttatatgccgcgaaaataagcaacgggtcatccacaggaagcatcacaatagggtctaagtacgctagatatcgcgagcgcaaaatcaagttcactccaaaaaacacctcaatcatcagcgtaagcgcaaaccttatgtcaaatccaggtttctccccgaatatatcgttatcatcattcatcgcgacaaagacagcaaaatagggaacctcaaatgcgacgtagaggatggcaaacaagcgcgctgtatcccagtaaagacgaaatgttgagcccggaagtctccagctcactttctgcttgaatttgagattgtgttgcgagtttcccgttgccattaagctgtgtgagcttcccccaaacaaatccatgcctccacttccccctcgattgcgcattcctagtagtttcttggttttgcgcaactgtgtcgagtacttttcaagtgtttctgccattcgctccctcacttcacccttggattccctgtaaaaatcatccaaggcatcatcaaacttgacttttgccagcacgtaaagctcgcagaacgttttcgcgacagccttctcctcaaatttctccgggaagagcaagcacgtatccgcgaaatggccaccgccttgcatctctttgtcatttgttccgtcgaatgcggataaaactacccggccacgaatgacgaaaaacatttgagcgttaaacttgggctcaataatctggtcgccaggggagtagactcgtcgtaccagcgccgccgccagcaagttaatgaattcaacgctctctttcaccagaaaacacacctgtttgatccggctcgccttcagcgtggacaccaccttggcctgtaagtgcttgggcatgagatgcagagcctcctcgctgtcgagactatggtgcgtgttccaggagtacgtgaagtacgcgataacctgacgtctcaaagcccgcgggatactttgcgagcgcatatactcccgggcgttgtccacgtgcgtagcaaacgcagcatagcgcgcgtttcggaaccgaaaaataaagagaaacgttgccagcaacgacgacccaaagagggcacccatgagcgtcgcagctaccacatagactgtctcgatagctgaaactggtgcaacatcgtcgtatcccagcaacaccatcgttcgtgacgcccaatacaacgtccgcgagtatttccgcgccacggaggcaccgaaaagacggtcactgacgacccaacttgtctccacatcctcgttgcaatccccaagagtcactccacactgcgcgtgtgcaagcagcatgtacccgcaagccatgtaatgacacaaccccacacaaagaacaatgttgcgtacgagactgccaataccagtagacgaaagttgctgcacccacgtacgatccgagtagatgctggccagtctcgcaagacaccgtcgcagtcgatacaggcggcaaatcttcgtaattcgcaccaaatgtagcgcgttgtacgttcccgaggcgtagggtattacctccagcggcagcagcgctacaatctccagcagtagctcaattttacgcgccctcacgtaattctgctgcgagtgcgagtcgtccgctgcttcgccttgtgtcgcagcagatttagcgatcgaagccagcgtccacttggttgtcccgcggtgcagcttgttgaacgacggggtgcgcgtgatcacgcgcatggagcggaacatactgtcaccccacgaggccgccctcgtgtcgaagcttgaaaagcgggagaatagtcccctctggagctggtagaactgcacaaactccacaactccgataatatccgcgacaacatccaacgccgcgtaaatgctgagctcctcggtccatcggttgagttgagcagcctccgttctaccataggggtcgtagtagaaggctattcggaagggaacggtcaagaagatgtagagcacggcgtagaggccgatcccgacgcgaacggtctgtctcgtcgtccaggagaggcgcttgtagctccgctcgagcgacgcgaagcactggtggtaggtgtacccacttcgtctgggggatctggtatcagcgagcttgggtcggtagcctggagtagggtagaagagactcacgggcggctcagtgacggtcgtcactgaggaggcccccgggccggacccggctcctgccgcgtacacctttgggttcatcttctcattagtagactgggactttggcctctctgtcgtcgtcgctcagtctcaccgacaaggacagaacctcttcctctttctctctggtctgggcgataggaggcgcgggggtttcaggctttagccactttcctcccttttagtatttttggacaggaagctgtaaaaggtcgaatgcgctccacacttcgtcgtgtccaagtcgccgaggcccttgcggtctgttgttccgttcatgcggtcagctaagactaatcccctccgagctcgtccagccctcaggtcgctcatgtcgtgctttcttcttgggttctggtgccatagtcgtcaagctcgagttcgtcactttaacttgggaaaccatggcttgcggtgccggagctcgcggctcgccctccccgcccgaactattattaatacatcttaccaacattcacggcagctccggcaaattggaggaatcagaccttaagcctgattcccgaacttcccaaatcaagttcgacgcaatattattagtagtatcactactactgcatcctgacaaatttaataccagaaagtagttgtagtagagatggtagtagtattatcacttcattaatattgtgaatactactatcggccgtgatagtaatgctcaatactacatgcacgctgcacctcgaaccgtccgccttgcccccgtagacgatctcctactgcggcgtacttgggcttgtactctttggtactttattttgttggaaatcttttctgactcacctcttttctgactcacctcgacttttttatttcccggcacttccccgtaacctacaacgtactctccgctcttcacttgctccactgtggtattccgactgacgaagctctctcgttcggcatcgggcccaagttttggggtagaactttctcaatcgacagcttcacgtccacctcattcccaccgacggcaatgccgtcctcgatttacgcagtgtatattgtctaatggtcggcgttgaagttcttgtcattatctttgtgtcaaagaactagtccccgagtttcttccccaccaacgcagcggtttccctcaaacgggatcgttgcccatttcaagtccaacttggtgagggcgtagcctggtaatcgaaccacacgacggatgtcgtggactactgtacatgtagaagtctcgcatttgaaagccaacaattattttgccgtggcaaacaaaaaacgtcagtccgactaaataactgcttggcggtgggctgtatgcaccccacattggcatttatttttttaacgggctgtccggggccgtgtcgtagagtaattgtgtccagcgccacgcgttcgtagccacgccaattgcacactcacaaactggaagtattcatcatcaccgtctccatctcaacatgagctgaaaaaaaaattcacgaagcatgttgactcttggactgagatgctaacacccttgagcccctttccagcaacgaccaccgccttctcaactcgacgcagtgaatgatatttcttccgatcctccttggcgcttgagccgacgcttctcccgcatcgaaaagagtgccaccctatcgtcgaacagatccatgacctttgtctctctcttgcggaggccctccgaggtgcgtacaacccgaagggcgcgctcgcggaggagagcggtctcgtcctgccggtccatcgctaccagcagaatggtgtagctcaccaattagtttaatatttcgttgtcgaggagctccaatgtcttagcttctgtgcgcgaaggctgcgagagtcagagctggccttgaaatttctcgtagccctgaattgccttcttgaaaaccttctccgcactttcatgttgctctctgtagggaataaacactcgttagcattaacctgcatggtcatgtcaagcttagaagcttagacgtacgtgtgatagtaacagcgtcccatttgattcaagactttcacaccaagggtacagcggatactaagaggctccactgccttgatatatttcgtcgccatatcgtagtacggtaacgctgaagcatgctggccaattttctcgcacaaatcgccgtgcaagcacgcccgcaagaccgcgttttctgcatgaaccgcacaacagggtgagtctctattgatacattcagctcaacttgtaataccgtaccgggagggatctgtacgtccttagtagcgttgtatgcttcagaaagatacttcatcccttgctcctggtctccctaaacaaaatacagtaataaaaaaataatatcagtaaaacgagacagtagtctaccgtatgctcgataaagccatataaattaccttcttcaacgactggaaacttaacttcaccaaccgctcgtgttccttgagctccggtggcggccgcttcttcatttcctcctattttgccgcaattttcaagtcataaacatcacgagttacgccgataactccctggtaagctacggaaggtaaatttcaccttgcacgccaagtacgtcacgaatgtcagggccagcagcgccggtgtgtgccatcgtggcggaccctccttcggcgctgatgacgcactggcgaaagtgcgagccaagactgccccattcttggcgctgcgcgaaggtgtcagactccgaagcgccgcggctgctgctgcggaggcggggcgagcgcgtggattaaagaagacccgacgcgcgtgccccccctaatcgggcctagttacgcccctactgggaatccttaacctagtgacgatcatcgccatcatgccgtttttttactgggataggaagcaacgttagtgctgctatcgcagaccaaaaaggattatatccgtggtacgtcaagtcaaaatatgacctctcttgaccccaacttcagaaaccggtatgaccccggtgccgcactgggcctccaaaaggtttatatgcgtgggcaggttgaaccggtaggatacccatcacaccagtacgaccccggtgccgcactgggggtccaaaaggtttatatgcgtgggcagtttgaaccggtatgggtcagtagcatataccgaatcggatggagtgatgtaaagtgaatgattgaatcgaacggactactacaggaatgtagtagcatacaaatgcaagcattttcatttgtccacgagctagatctcgagcaaggttcgtttcattactgtgtataattactgcctagtcgtatcttgcatcttcgccgtgaccgggcgcaggagatgactgtggatcgtaaaaaaaaagtaataaaggagtttatcccaaaaacctcctatcccagccttcgcggagccctagttgttgtttttttcaactgccgtgatccgcacgatacccgaaacgcgctgacaggttttgactcctcgttgacacccgaccatttctcaactggaacgaggagagaaagaagttcatgggcgaggaaggcccttgtcgggggcgcctcttccggctgctgaggctggtccgcgagacgcagtgcgagctggaagtggtgaagcccgtgctggacgagctggaggtgttgcgtctgtgctgcagcttcggcatgatgccgaccgtgaaccccatggagtttgatttcgacgtgctgcacgccagcgagtttgacaaagagtttgcagatctcttgcgctatgagctgctcgagcgcacgtgcctcgataaagtgagagtcacggcgctgttcggcaagcagaaggatgtttcggccgctttggtcgacatgcaggcgttgtgctcaaatgagacagcggcgtggctctcaggttctgtggaaggggtttactgtgtgaaggttgcagccgacggagagaagaacaccgagaaggacgactctggtgctgatttggttctcttctcgtggattcgcgacgagttgttcaagcctcacatgcttcgagacacacccgcgtttgtgttgcggtttctaaccgttctaagtccagagattgtttgctgcgtgtccaaggaggatttagagctgctgaaagccgcagtggttgaatccgaagagcagcacgacgacaagctgtcactgtattcggtgtctttcactatcgagaagcaggaggatgaacatgacggcacggagtgcgtgtcccacacttctgccgacttggatggtgctatggggaactacgcttagtgaaaggcagttatcctgctctcgtattgacgaaaacgatggattgtgcgattcgcgccgaaccatttcaagaaacatttcaagcaaacgcaaagttgtcgtttgcagcatggctgaaggcggagtcggaggtctaccggatcgatttgagtgggactattggccgttcacccaagctctgtgaaagcattcttcgtgaatttgatttgtggccggaggagcaagtgtcgagttgccgtgccttgcacgaaaagaagcagatggaggaaagagaacgatctcgtcggcgcttaagaggtgatattgcagagcaacgcacaattgtggatagctcacgcgagctacttttgcagctctgtaaggccaactcaccagcagcattgtcgcgctatgaagctgcagctgacaaatatgcaactttttgttcgtgggtcaaagcaaacggcatctggaagcttgatcgcaagtccaaattggcgctcgaaatccccaaccgtctgcaagatattgaggcaacactgctcgaattgcacacgcaaaaccaagacgccgacctcgccaaattgttgagtttatgcgcaacctcccccaaagcgaaccttttgcttgccattgagaagcagaagaggtcaagttgtagctccaccagctggggtgctagcgactcgcacctgtggacgtcattcctggcgaaaacggcggaggtattggtcgagctgcaggtgaagtggtggactgccgtcgaaaatggactggaagcggtgcagttggccggtcttgaagctttgaaccgcgagcagaagcaaagtgcgtctgattttgacagtagcactaaagagatcgtacgacagcaattcgatggtctccgtgaaaagctcctggaaaaaagtggattgctgttgaaagtaagcgcaaaagctcgtaaggggtctatattgtgcagcggaacgagggaaattaaagcttcggccacccagttccacgatgtcatcaaagtacaactgaaccgtggcgttgtggacgattgtctacagacagagcgcttgggccatcatgtgcttaatgcgtacgagactcacattgcgatgttcacgatcaagaaccggtcggtcatacaaataagcacgggaaatgaacgaacgtacgtcaacttggtgcactttccggctaatgccgatgggccttctttacgcgcgagtgaaatggtcatctccacgtttgggaaggtgccctcgctttgcgacttcaattatcagagtcgaagcatggtcttcctgtcggcagattcagtcgggatctacaaattcgacgagacattcaagcgaatggactacgtgaaagttgttgatttgggtgtgcactcgacgttgacggctccattcaacgatatgctcctcctgggcaaaacagtttacgtaacagactcaagtggcagcctacaaggtgtcgacatcaattgtgaccaaacttcgattaccggagcagtacccagtgatactgatacttcgcgcagccgtcttatggggttctcggatgatcttgctatcggggctgttttggtcacagcgtgcgcggatggatcttttgagggaaaactgtcgtgcgttgctcttgatgcctatcgccagctacctgttgcgccactaggagacacttttctgacgaacgaagtgcaagcagagagtgtgaacggacatgtttttgttttcgatccattagcaagaaagctgcacgcattttccgttgacgtgactgtccgtagcgattcctacagcatgcggcagttcgatgacgatgacgacaccaaggcttctggaaaggatgctagcggcgagaagtgtctgcgcaaggagcactggatgtacacgttttatcacgttttcgagaagttcccagtgattgggctgctggaagatggatccccgccacctctttctgttcttgtgtgttgccagtcctgtgacgacgtcaatggtgctctagaagattgtcacaattttctgtcactgttgatgagcgacttgatggctgtcaacaaaccgttgcgagggctggatcttacgagagggcttggcatgcggtgtacccctttactgggtctgaatatgagtgaaaaatccatggtggcattcctccagacgctcgttacttttcttcctattcaaatctgtcgcgctgaggcaaacgcgctgacagtgctacgagatggattggacccatctttcgatgtagccgaagtggagcaggagtcagcggatattgctgaatcaactcgatttgggcttttgtcgccacttttgtcggcgtgggaaggtcgcgtcgtcgtcatcacgtccatgggaaagcagtcgaccgggaaaagctacttcctcaatcacttaacggggtcctcgtttgccatcgctggaaatcgttgcactgacggtgcgtggatgacactacgcatcatgaaagatgttttgcttgtcgttctggatttcgaaggtctggggtccttcgagcgaacagatcaagaagatgtttttcttgcggtgctgaatgcgtcgctgtcgatgttcacgatattccggatggaaatgcggcttgacaaagaaattgacaagcttttcaccaagtttcaaaagggaatggatctactcaagcaagacaagcgactgttccgaggaatattctacatgagtgtgaaggacattaacccgaatgatggccgagatgtcctctcggagtttacggggaaaatcaggaacctgctcaaagccacgtcggggcaaaacttcctaacgaacatgtattcgggtaaagtgagtattaattgctcccctccgttagggactcctggctactacgagtcgctacttcacgcgaagaagttggtcaagaaagttattacgcagcagggcgaatcggagcatgggtttcgaagcggaagagccttccacgactttatccgactggtattggccaaaatctcgatcctggattggaccactgttgaagaaaccgcgcaacaacttcagatgaaggagcttcaccgaaatctgcctggtatcattcgcacaggaattctgccggattcaaagaacgagcgtgctgctggaatgctttctttcgaagatctatgccatgactaccacgagtgtgctgaatcttggaagcgtttgaacctccagttctcactagcagcgattgacgagaatttagattttggaccatcagtctgcgctgaaacagcggacacagggtctatctacgatgccatcacgatgctgtttcaacactatttggagctgatattgaagggagcagaagaaaaaatcaccacggcagactacaccaatttcgacgccatgctgtcttttttggtttgccgtcgtaaatcgaaggctgttgtctgggtgaaggaattcctgggacctgagcgatttgcggatgattgggataacatcgagcgagctcgacttctcccgttcgagacgcgttttaagaggtgtggtcatgggtgcgcgcagtgccaactccagtgtatgcgcccagcttgccactccccaggtgaggagaagcacaactgtggcatgactcatgtgtgccgcagctattgtgagtactgtgtgcagagctaccagcaccgtgaacaggttcctcgctgtaccggtaaggctggccacgaaggaacgtgcgactgcggaaagggagaccacacttgcgggtttgtatgcagtctcgcggatgcttcgaactgcgaaattgtttgcgtgcagatggcggggcatgacggaaatcatcgctgctccgtcaagcagcacatttgcggtattttgtgcagtgcgccaaattgtgaaggggtgtgcgtgttgaacggagagcggcttcacactgtgcacaagtgtgtggagacgcagtgcgcctatgcgtgcgagatggaaagctgtgaggagcgttgcgattccgcaaaccattttcatggaaatcctggattaagtgcaacacttgcccaagaacaaggaggcttgcttgggtattactcgggcagcagtgaaaatgcgcggcatatgtgtgcttcaagccacgtatgcagtaaagtttgtgaggcgaatggcatatgcagcaaaagcgtccgagtctccacgcgtcagttcagcggttcgttcgacaatttcgagtatggatcgaagcggatggttggaacacgcaaccagtgcgccatcgtattggagcccggacaaacaagccacggcggtatgcactcgtgtgccaagaggttgtggggtgggagggtagcccctcatggatgcgacgcgagatgcgtggcctgtgagtattactgcgccaaaccgttcggacaccacggactgcactctgctgcacacggcaacatgcgcaagatgcactttgttgctaagcagagcaccatcagctgggataaccgcaagtacgccgcaggcgagaagggtagcgccgaaatgtgcagtttgtactgctctacagccggacgaggacacgtccactacctcaagtgctaccagagtgctgatgcgtgtgtctactcggctttgggggatcaccgacgccactgcgaaactgcgttgattccagccccagaccacgaggttgatgaagtgttgcatgctgagtactggagaacgatcgggtgggaagacccttgttcgtcccctgcagagcgcgcgctgttcactaagtgtccgtacttatgcaatgcaccggaccacaaaggacgtgagaaagaaccttccggctgtgatctccctgtctggcatctacctgctgcatccgttcccttcctggagcgagatggtgtcacgtacatcaacggccatcgttttacgtgctcgcatgccgcctccgctcgtatattgcaccacgttttcgtcttggactgctcggggtcgatgaaaggcggtccgtggcaagcgttggtgaaaggagtccgggactatttgcgaggtcggatgtcgtgcggctgtcgtcaagatatcgtctcggtaattacctttggggataagggcactctcgagtatgaaaaagtcaagattgagcaggctgcaacgcgatgcgtgaacttccgtggtggggggacgtactatgagaagggcttgaaacaagcgaacgccgtgctctcacggaatccgatgaaaaagtaccagcctgtactcatcttcttcacggacggtcgacctgctgaccgtaagcaagggctgaagctagcgacgagcatgcggcagcaatacgcggtgtcgggcttgcgagcttttgtggttgggtatggacgtgtcagcgatctgggcgtcacagatctcgccgagcaccttggcgggacagtgcacgaagccatttcaattgacgatctctgggacacgttccgctcgatctccatgtcacttggggcccgtgcagggctcatttccagcacctttgcgtgaagtaacgagcaaaaaggcgtcagcatgtgaggataaggctcagcgatgatgaagcacgtgaagcgacgacttgaaaaggctgtaaggggaagaaagaaagaaactaagaaggaatgacaaaggcagcttttgacgattttgaaggaagatacatttttgtacttggcaccagctaactagccaattcatagtcttacaagaaaagaagtcaaagtggagtttcctcgacaaataggttttcgcactacttttgagtttattgctcaatttcttcattgcggctgatgagtggtgacgcaattgtatgttcggctgctgggggcgagttgcgccgccggcacccggaattgtctaccgactcaattgcattcggcagggcggtactgttgagggtattgaaactcacatgccactccagcgggtcggtcgccagcatgatgtgaagcaggggggcaaacgcctcgaagcagctgtggggcgtcttcagagctttgaacatcaaatcaatgttggcaggaagctcatcgctctccttgtccgcaatgtggacgcccttagcttcaccaacgttcggtacatctttgtggccgctgcgcaggagatggtcttgcttctccggagccttgctgttctggtgtgtgactttacgtcgtagggacgataaaggaatccgatccgagttgggaggagggtcacccgcttccttcccagcgacttccttggcaacagggaggttcgcttgcgcagctggttgtctctgggtctggatcgcttggacggctcccagtagagctgctccccagtgctcttccatgtcagttctcgagcaagacgcaatgtgttgcttctttaggtgtttgtacgcacgctcacacaaattgagagcgagacgagtgaataggtgcccctgcagcacttgaacaaacgcctcggagctcagagaaagcagatcacaggcccgtacggtccgtacagtataagcgctgatggtgcaccccagcaaaccacgctctccgaagtagctgccactacggagcccaaccggtcgatccaggagagagcggctgtgcatgctcaagtggcctttgatcacgaaatacatggctcgcacgatacttccttccgtgacaacactctcatcgcgtgggtagcactcgaagcgcaagcgttcagcaagagcgcgcgtgaactcgtccatcctctggctttcgtcccagcaaacaggggcgatgaccttcatgatgaaccacgaaaggagctttgtggacacttgaagcacgtacgacgtacggatagctttaggcatttccgccagaagttcttcgtagttcacaccagcatgcgacgaccagagagacgtcataaacgcgtacgtccgagtcttcagacgatcactgagacgaaggcgtgccatgtaaaggtccacggcgatgtaattcttgcggaaccccacttccagtccgatataggaaatgaaaagactcgcgagttcaccaatgacgtatgacatagtgatgagacccacgaaagacattccaatgtggaacgcgtagagcgttgcagtctcaggctcggggcagtaagctttcttgacgaaagtcaccatcgcgaagaaaagtccccgcaatagacgaagcgcgagctgagaggaggacggattctgagggtccgagacaaccagatcctgggacggaagccacccttcccactctgctccgaagcctgcgtccatcgacactgccagatacgcacacgccacccagtagatgaccaacaaataccccatccagacgtgccaaaagctggatgtctcgttggaaaaagctacgtcggtttagctcgttgaagtagctgccgaggttgaaaatcttgatgcaacgtagcaatttgaaccacgctctgcagcccagtactgccagcacatcgtagaacggaatggcggcgaggatatcccacagcatccgctccttcctgtacacgctacgcagcttttggtcatacagttccatggacgcctgggactcacgcacgtgccagctaaaccaaagatccacgacgatagcgacttcgcaaaggatccctatgataattacgagaacggggacgaccgctgtgcgatccatagcgtccatcgtgagctggtagggggtcataacggcgacaaacatggtgcagcaaatgatgaaccgcagccaaaagtggggaaacttgctctgcactggaaccccgtgaagaaacccatcgaccaaccgaagaagaggcttctgaacctgctggtctaccaaacccaccgacgtcggaactgggaggatccgactgctgctcccagtgctgctacgctgcaaacgggtgtgatatcgcgctcctttcgacccctcggctcgctcattcacaatgtccgaacgtgacaaagctcgcccaccacatatcagcatcccacggcgttgctcatcgcgcgaaagctgctccagtcgcgcctgctcacggtgaatattcgcgatttgaatgaccttctccttccacttggggtaccgctcgaatactagctccagcgattcgcgcgacagtctgtacaggatgcacgacgtccgagcctggatgtaggcgtcccgttccccaatcgtgaataatccgttctcaccaaaatatctgccagcggatatctcgttcatcttcttcagttggcctggaatactgatctgctgcaagctgtcatcgatatcctccggtgtcggtccagcctggaaggacgcgttctccttgcttgctacagtgtctgctacagctctgaacgtgggtctggaacgtttggctagctgcatgggcagcagaacgtcgaggatgcccgtgaatacgaagaacatgtcgctgccgcagtccccgaacctgaaaactaactcgccacgaaaaaccagcacctgcgtgaactgggacaccagcattcgcgtgatgggtatctccatccccgcgaggaaatccactttctcgatcatgggctttaggtatacaaggcggatatccgtcagcaaggacggtggcgaacactctccgagcagatgctgctgggtgatcgtgtggtaccttttaaacaacaagaaggtctagacccgctcctggaggatagtcgggatcttgaaatggtctagcatttgtcgtgctgcccccattttgacatcgaattctctgctctcggagcttgtgagctcgataatgtcggtaaaattaccaagcacgtacgcaaacaggaaaacgcccgcggtcatggtcacaacgctgaaaatgcattgggccgtggtctgtgggtactcggactcgcctgaagacgacatgagaccgaacgaccaatagagagacgccatgtactggagcatgagcgacccattctccagcttcttggatggcagccacaggttctcaccgaatgccgtctgggtggcggtcggggctgagctgtcgctgaatttgggggtggctactcccgacgcaaagttgaaccagatgcagcccagaatgtgcgagagcatgaacgtgtagcagagcagtttgaacagatgcagctccgttgtcgcttaaggtaccgcgtctcgagtgcgtgaagttgcttgggaactttgaacaatcgcagaagtttgttgacgttcaggaggtcccatcgctggtacgactctatgccccaattcacagcataaagcggcaatagcgcgatgatatccaaagcgaaagcccccgatcggaagtactggtgcttgatgcggtggatatccatgactttattcccgtactcgtaaaacccaagtcgtgagcgaatgaaaacgtccaggagaaacgaacactctaagaagaccatgagtgagtccaccttattatgtctttcctccagagggaagaacgcctggaacatcactaccacccactgcgtcgtcatcaccatgaacagccacgtttcccacgccaaagtaaacagtgaatctggatcgtacacaatagtgaatacgcttgctagggccaactgcaccctgtggagcatgctcctgacttggttatattcctctctgtcggtttgcacgtgcatactcgcgagttcgctgctcatcagcctccgatcaacagtgagaagttcagtctttaatggtgggaaaatcgcctccatagctcgcagttggtcgcgagacacaaagagaaggatacagccgctgttggcgctcacatgctccatgtaaccttccccacgctcctgctgtgtcagtgtagccgtgccaacgtacccgcctctgtggattttagacggaggtccacccattttcacgacgcagacctccccttccagcacgaaatacatttcagtgacgtagtctccatggcggtaaaccgtctccccttgcccgtactggatattttcaagttcaaggtgaaaatagcttttgaggagagaaagcagagatgaaaccaacgctcaagtgctaggagcagtcgtagaggtcgtagcgttagtttcaaaatctctgtctgccgcttaagctctcctgctttagctttcagccttcagcactccggtcatggtgagacttacaagccgctccttccttcacttgacacctgaagtggtggagttcgaagcagagcatccgttttatgctaaggtcttacagctagactcggaggagatgacgtttcgcagcttggaaggaggcgaagggaaactggatcgtgccgtcgccgaagaccacgtggttcgggccagtcaagtttctcaggccggtcagatctcgttggtccgacgacccgtgtccgtcagtttagctggagaggttcagtatggacaagtgacctcggtcgaccagagcagtgtcacgatccgatccggtggtcatgaatttgtggcagcggcagctgcagtccaccagtgattgttctgttgcttgaagacgtcgagttcagaagcgacgagtggagtcctactgacctagaggcgatggagcagtcaattctgagtcggctgctcggtaccggcggtagttctgcttcaaatcaagtgtccgagatactggaaggtctgatgagtgaggaaaatcaccctagtggtgacaaggtgtgtcagtggatcgacccaagaacaggagaggaagctcattttccactccagcacgctataaatttcgctttttacgtcgacggaggggtgtcaccagtgccacgcagcgtaggcaactcattttgcataccaccaaagccccaaccgcttcggagcacgtccgctttgtctcgcggctcggttcaggacgtggaagagctctttgacccgtttccagacgacgatgactcgccccaaaacgaatcggaacgcggtgctgaagttggtcgggcaaacactaccacacaacacgtgacaaaacgacagcaagaggtcacgattgccaacggcgacgatggccacgtcccctccaagcgacaacgagttcaaaccgctattgatcaagacgcgttgattatcgcaaaaataagcgacgaaccggaccttctcgagcgtttcttaataattaggaaggaggaggccaacgtcaaagcgcagccggtggagggtggtggtaccatgcgtactcacgtacagaagccatcccctacgacaaaagaagtcgtctaagtacgcatttgcaccgtccgaggagcaggaattagttcacaagcgcataataacggagaagcacaaaggttagtctgccaatgtgttttgcagaggtttagttcggtccgagcacgtggagttcaaagccgtacctggaatttgtacgcaggcctatgatattcgtttcggttctggtggtctttcgattcgacactttgcaagactatcgagggatgagcgggtggcttggttggaggccggtggttcaagctttgacaatttgtccgcaactgcagaattctcggcggcatcgccggtatcgcgcatcgaaggtgttgtggactctgacagggttttcctcacctatgctcgcgagttttgctgtgctgaactggtcgaattggttgagaccatcgtgaagttcaccgaacacacgctatcgcaggtatcgtggacgccaaaagagatttctagcttagttttctgggtaaatgacgttctcgaggattttcgtacagcggctgaggaaggtggtgagcttcgagccgtacagcaacattgtacgaccgatgaccggttgctcaaggatgtgatgtttataaaggtgcatcggcaagtgcaggatgtacgacacgagatgatgtcgggaccagcacgccttgagggccacgttgaacaaggatcccagctccgcaacggccgcaaccacgacggtaagaagcgatttgggcgaatccctaaggaagtacttcgcaaattaccagtgcagaacgaccccgcatcaggaaagtcgcgacgactgtgcatgcgttttctctcagcggcgggttgtgcggtggacagtgatggcggttgtcccagcgagcatgggcatcgcgttcccaagctgctacccgcgatcgtgaaaaaagagattgacaggcgctttggtgggctgaaggacgagcacaaagagttatgactcgttcagactggtctggcaatgtatccatcacgaacgcaaaacgaccgaccgtcggcggtgccatgcaaagccgatagggtggcgcgaggtcaagtagcaaactgcgttaacacaatcaattcaagtgatggatctcagacggtgttggaccagtctagattacgcgtgcaatcgaggcccccacgcgactcaattagggtacccacaacaacgagcaagattggcgaggtaatttgtgcgcagtcggcgggatctgcggtaaatccgacagcgccaatggctgctggttgcacagatagtcgtcaatcgaggccttgttatgacacagaggcagacgcaaggagcgagaccggcaaggtatcctgcacccgggtagctgacttgcgttcaaaatcacttgggtcgcagcagttgccggtggagggtgcaagcgtttgtcggttgaggtgttgcagtcacgcccacattagtctgtcattggattcggcgcgagagattcaatcatgtttggaagtggatttatttcgggccgaagctcgaatttccgtcctgcaccgcaaacgggggttcgttagtgcaaagcgacccgcatctcctgtctacgcaattgacggagtagcctgcaagtctctatccaccgtaattcgcacgcacaatatgtccctggaagaggctacgcgatttgtgcggtgcgaagatagcatagacagcagaccgaacaaagccatcgatcctgtccggctgcggaccgttcttaacggctatcaacatctcgatctactcgttgaaattgctgagaagggcatcgacgtggggtggagacaagggccgagaccgcggcggccaccaccgaagaaccatggttcctgccgacgttacctacgtgctgtcacaagaagcattcgggatggccaagactccggtcaatatttgatagttgatgccgatatcattgagcggtggccagaactaatctgcagtccgctcggtgctgttgagaagaaggatgtggacccgatggaggaagtgcgcataattcacgacttatcctacccaaaagacgactgtgtaaacgctgcatttattgtcgagtcggtgcccaaagtgagatacgagtcagtggtagttatcgcacggcgcatcgacagtttagcaaaagcagggcatgcaggccggatacgcgtcctcaagggagatgtcaagagtgcctttcgccacttaagaacacgcgcaaaccaggtcttcagaatggcggcatatgtgaaagaactcggcattctcgtcgtcgatatggcggcaccatttggctggtcaggttcgcccccctgctacgcacgctttggccgtgccatcacgtggctaatgggcagaagttcacctgcagcggtgtccgactcgagcgacacgaacccattttttccttacgagtgggtagatgaccatgtcttggtcgaaccggatgtccagaacaggttagaactcgctgaagctactttacgacacgctatgttggctgtcttagggccccgttcgatcaatgaggcaaacttttcggaatggagtgtggaaattgttgttctgggtctactatggaacaccgagcgccgcaccgtatcgataccagaagagaagatcgctaaagctcgtgctcgcgccagtgcggtggagcaacgcggcacagcgtcaaaatccgaactgtacaagctactgggttctcttcgccacgtggctaattgtctgccaacagccaagcctttttaccaacgattgtagacactgtgtacatcagcaccacggttcggcagaattaaacttacagcaggggccaaaacagatctcgtgtggtttcggcacattttaatgcatggttgttttgctgaattaccgcttgcgatgtttggcgagctgccggcaccggacgtggagctgtatatggacgcgtccaacctcgggctagccgtgcttgatcccgcctgcgagtcatatatacagatccagtttgatgacgaagagaaattgctcatcgacaaagttggtagcggccatgacgagttttcaatcaatgtcagggaacacttgtacattgccatcgcgttgtggtcgtggggttcaaagtggagcacacaagcgaacggacgcacaattcatgtcaagtgttggagtgacaatgccgcagctgtgagttggtgcaatcggatgcactccaacaacgcgttcagccaagaaataaatcgggcgattggtctggctgaagtgtatttcaaccttcgagtatcggcggatcatattccaggatcggccaattggatggctgatgcagcttcgcgagcttggcccgaaccttacattgctcgatggactaatttttcttcgtgttgggtgcagacacaagttccacaagaatgcaggaaaatttacatcgacttctcgaatctcttcagtccgagtcactggccacgacgtccaagatcaagtatgcaagcacatggacacagtggtgtagatggtgtgagcggcttcaattcgcaaaatggctgccagaagaccgccggcaacattcgtaccagctcgcccttttcgccacgtactgctggaaatatggctggggaaaatcgggatcggggaattctgcctcgaccgtgctctctaaagtcagccatattgcgtggcatcataggcgaacccttggttacaacgtcggccttttgccgggccaccaactcgctatcaccgcaatgcggcggaaagacccatcaagcaagccaaaatctcccgttacaagcgcaatcctcaagtgcctgcatgagctcctcgatttcgcagttgcccagcaccgggtcatttggggggcttcggtgctgggcttcttctttcttttgagaagatccgaatatttggctcaaggttcaaggatgcacgactacgcaattcggagagcggatgtcaaatttgtggatgctagaggccacgagacccgaaaccttcatgatgtgacttcggtgattctacaatttcgagggagtatatccgaccaatttggcaagggtacttctcgagaattggcgagatctgggcatcggtggtgttgccctgtactagcagcattgtacctagttcgtcaccacaaggcgcttcgtattgatgcgggcgagttactgtgcaaggtggatgcatctcacaatttgcaagtatccgacgtggtaagagcgataaaggctgctgctggtcgagctggccataatccgcaagactacgcctcgcactcccttcgaagtggcggcgctacggcgctgtttaatgctggttttgatagtctggcagtgaagctgtttgggagatggaagtccgacgcagtcgaacgatacacgcgcataagtgggcagttgacatcgcggatggtcgcaaatgctgcagaagcccgcattgcatcaagtttaggggcatcccccacgcccggataccccggcagtggtggtgctacaatgcaacttcgtcatcattgtgccgcgtttggcacacccccagaatcgtgagcgacttgactgaaaagaataaagctggcgttctccaccataacttcttcgagcttgtcccgtacaggatgcacaccctgcagtagtgctagcgtctgcagaaccggggtacaaatacttcgtagcagttccagtcgcattgagtgtggcagatctgcgagtaagtcacggagaaccgcgccccgatgcgaagaccaccagtaatccaaaaaggacttgacacggtggtgtatagctagcggggccttctgtcgtcgaaggaacagctgaatgcgagtattcgtctcgataaactgcttctgctcgaaggcggaggcggtaaagcgcttctgtacgttgtccactacaacgcccgatatcaagaaacctccgagcatgaggatcaacgctgctaccagttgaacgtcactagttggctccacggtgttcccaggcgacgccaagacccctacagcgtaataaagcgagcggaagtactccatggccgcaatctctcccagctctcgtcggttcatattctcatcgaatatcacgccgttgcagttcgccaagtgcgttgcgttcagtcggcgcaagcagaggctggtagggcagacccaagcttcgttctcgtttggatcgaacccttcgaggtacgaaatgccgaagtaaatgcacgctacgacgtggaacatcatgaagaacaggaggatcagcagcacaagctgtcgcctgctgttcaactggatgaagtggtccagctctttcaggtgccgcttcaaatggaacacgcgcaggaggcgaggcaaccgcatgagtccatacgcctccatgtgcagatacttgtagggcaacgcgcacaggagatcgaaacgaaaccccgtccggaggtgtcgaagtgcactcagcttcggatccatgactttgtccgactcaatcatgtaggcgagattcagattcaaaacgaggtcaagcagcaggccgatattcgagatggagtcgatggattgagtgacccacgacgggcgctgccagagcgggaaaatcacttggacagggaccatgatccagcagtagcaaaggttcgagaacagcagcagcagccaccacattcgcgcgggagaatcaaagtcgatgcatctctggagcagaatcagccgccacaggccgtggtgtttgtacaccatcttgagctttggtccttggcgttgctcgaacggtggaggttcgtggtcattcttcgttgtcagagtgtgcgagagcagatcgtccgttgacatcgttgtatctgttctcgtgtctcgtgagagatgctcaatgttaactggcttaagacctggctgagggaggtcctgcagcaacggaccaatggagtttttcttggactgcttgcgcgagatgcttattcgttgggaggacaagaagctgctccctctcgacgcccctcgaactctcgccagcgcgcctgtaatgcctccaatggtgacggaagctcgacggagcgctgctcttcgtcaattgcttcgagacgagatggagttgtacgacgtattgctgcccgagtcgtcttcgctgatgttgagctgcctgaggatgtctttcacgtggacagcgatgaccgacgcgcagtccgggtacccctccagcacgcgctcgcggtggaatcgagagagcttgtacagattcgcgtacgtagtcgagatgaccgtggccgtgcagggcagcgaagagaacacaaacagctcgccgaagcaactccccttccgcatctccagtacagtcacggatcgggctacgacggcaagaactcctgatcggacgacgtacatcgcgctcccgtggtcgccttcggagaataatgtggtctgagctggcactgcagccaattcgagcagactcgtcatggccacgataaactggtcgttgcagccgacaaagagcgagatttgggccagtgtcgactttagcataggcgactgggctttcgagagctcgggaattatcagagtggttggggatattttgcgctcgcgggacggtataacagagatgatgatcactccagtgtggcgcgggaagacccccaaaaatctccgaaattcgatgtggacaaatggtagcgtctgggtggcgcgctcgctagcaccagccttcccggaaaatagtatcagcggacagaccgcattgctggctaagtttcgaaagcgacacggtgtcacaacacgatggataaatggcgagttagtgtgtgatctccgttcaatactcgtcggagttcagacttacgcacgcttcctagaagaacgattcggtcgctttgtcggagacggcgtaaagcagctgaaactacgcgatctgccactctttacgactacggggcagcttgaaataatgtgcaaacgcttttctctactggcaccggcttcatccaaattaccagacccacaccatgaattcctgcttagtgacggaccggcgcatgttgtaactcacacatggggctctatggagcctagtgttctggagcataccactccaccactgttagatcaagccatagccacttttctcggggtgcccgtcgccacggtgtggacagttccccaccaactggtgactcgcttggcagtcacatgggccggaacggcaaggtggccgcaaactcgagcgaaatacaagcgtcaagctggagagaaaaggatgttgaaggggaaacaacgaatcgaaaacgcagtaattgcgtgggcccgagaaagcggtgttatcaactcggctttggaccaagtccaatggatgaacatttcgagaatcccaggcacctcctcataccagcactcactcctgtatagactcaaactccgtgctttgtcgctgtgggccccaccgctcaagcgccaagcatgcccccacgcggaatgcacacatcacgtcaacatcgcgctttctcatgtcttttgggaatgcccgcacgcgcaaaggaggtggaagactactcgaagcatttttgcgcagcttgatactgagtccaatgcaccgagcattaccgaaatcttctcatgtagactgacttatcctcctgggaaatgcgtgcgttacggaatggagttggcaaaacagaactcccgtttgcacaagttacagactacggatgcagttcatgctgtcgtcaacaaatattggagctttgccgtggtagaaacgctagcgtcgatttggcgagcccgcgtggatatgatttacaacacgactgcggcaggaagagcaacaaatgaacgggacgcctcttttcacgctcggctacagaccggttttgatattgtggcttcaacattccaactagataggaaaaatgcgggcgactgggccagcgccatggacacgaggaagcgtctgcaccaacaaaactcagacgacatcgtagctccgggagagagtccatcgcagcccgagcactatgttggcttcatcgatggagaatcgcgtggaaatcctggaccaggcggaagtcatccaggtcgacgagtgcggggtaccacgaatcgtctggttgagcagcatctcgctgctacgtcctacgtgtacaaacaatttcgcagaattcaacggattgctccgattgctacaccacgtggacaagcgcaaactcaaacaggtgcacatagtaggagatagtcaactcgtcttacggatgatacgggagcgcaggcggccaaaagctcgggtgcttcagcctatttatgacagagcacggcgcctagcagactcggtgcgcgtagcttcatggagacaccactaccgttgccacaacaagatggcagattgtcttgcgaacctcgctatggattccagacgaagtcagcaggatgaacccatgaatagggacctggtgaaacgacgatacccgggcgttctcagcttcttgatgaatgactacaggaaatgggcagacacgaacacaggacaagaaatcctcatgccctcttctctctaagcgaagccacggcttagcttatagggacatgcacatcttacatatcaaacccactcctcttgctcttgaggatgaaagggggattagaagttcggccacaaggccagtaactcagtacacctcaacgatattaaaaaaaaatcgactttagcagctccacttggatgtcgttggcgatggatggacacaaaatttcgcggtctctcggtctgcggactcagcatcagtataatagcgctaaaagacacaggggaaatatttgttagtcttttaggttgttaccatgcacgatacagtttccacaacttacctttaggtactcgatggcttgagtttgctggctttccggtacgtggtggaatgagagcacatgcacgagttgattgatgcgcgcgctcatcgcttcagcgttgccactctcacacttcgagatcacgaagattgtagcgcataacgtcgtgaacatggagaacccgcagagcgaaaccaagatcgtgaacaggaattccgaactgtggcgaggcagttctccctcgaaaagtcccgtcatgatccccacgctccagaagagcgacattagataatctcggtgcagcgagtgtccgtgcgacagggctttcggcagccatggatcagtatggttttgatcctctccgaagatgtagcgtacgcacgctagaacatgcgccagatacacggtagataccaacaccttgagaagttttagcaccacgaaatgcttggcgtaaaattcatccacactcgacacgaggtgggggagtcgcgaccacctcaaaagtttcaggaacagcagctcgttcaccagcttagggtatcctattaccagcacctgagtcggtactatggcgataaaatccaatgcgaactgaggcgagcgcacatatctccggatcgtgcgcttcttgtctcgaatgagattcccgtccgagtagtagcccatgtgggcttgcactaacaagtctatcgcgaatacaacatcacccgcgaccaccagcacagaaaacgtcgacatcgcgccaacgacctcgggctggaacgataaaaaatagggtagcacgaacgcctcgaggaggagacagagcaggagggcttggtcccagagcttcacggcgcgcgcgttcgggtcgaaggcattctgacggtcgtctgctaacactttgcccacccgggtgtgtagactgaaggagccgtgtgcgcggcctacagatcgacgaccgcgggacattatccacgactgcatatcgctgctcctgctggccacactgcttcttgtgctcactctgcttctggcgctcatcctgctcttcgcgctcaccttgctccgagcactcgccttgcccttcgcacctcctctcatcatcttcgttgcatgcaatgagtgtgtacgcgggcgaaacaaacaaaaatagtcgcaagttagacatggaagccctcgacctcaactgctcacccacctgcgcagcaaaaactaaataaatcgccttctcagttattatcgatggcaccgccgaacttgcaatcgaagagacgaagaggttatcgcagtttcccaatctgccatccgacaaacaatcatagttctgctcagttctaatccgccggtctacctgcaacgcctaacctgttgatcaggtcaacactaccacggaatgactctcaccagccgataattagttgcctccgagcacttcaggcaaagatcagcatgaactcggaggtacccaaccctactatgataccatcaccagcactctcagtcaccgcacacctgcactctaccgcttggtggcgtgcgggtcctgcaaaggatcgcggcgatggccaagatctcagttctgcggtcagacgcgagatacttgatcgcagcaaatcgtcatgctactcatgatgtagcgccggtgacgattaatccgtaggacgtgtctgtacctctttagctggagttgacgcctctggcgctatcttagcgctagttgatgaatcaaagcttgctttccaatcaagcgggtcggtcgccagtacgatgtggagcagcggtgcaaacgcctcaaagcagcattgagctgtatccagcgcgttaaacatttcatcgatgtgagcaggtagctctccccattcagcggtgactgtcggtggtgccttgaattctggcctctttgctggtgcgtcattgttctgctgcatcccttgcccctccgcctccttgattctagttgaggcccccgacgcatcgaaggcagcgggcccttcagggtggacaacgctgtcaaatcaccgttcaaaacaacagcagatgcagtaaacgatgcatcggcgtcagtataaacgcccgctcggtcgttggcagctaaagttgccaagcgctgatctcgaatggtatgaagtaaggacagcagcgccgccccccagtgctcctccatgtttggctttgagcacgacgctatattctgcaccttcagaagcttggacgcagcatagcagagcttgagcgccagacgtgagaagggatacttgtttagcacttgagcaaaggcctcggagctcagcgaaagcagatcgcacgcgcgcaccgtgcgtacattgtaggcactgatattacaggcgagcaatccgcgttcaccgaagtagctgccgtcacggagacccagtgcgcggtggatgagaaatcggctctccatcttcaaatggcctttgatcacgaagtacatggcgcgaacgacgctgccttcggcgacgacgttttcgtcgcgcgggtagctctcaaagcgtagtcgcttggccaacgaaagagtgagtgcgtcagtgctttcgtccccttcccagcacagcggggttgcaactttcattatgaaccagtccaagggcttgttcgagacgtggagcacacacgctacacggatatcacacggcatttcggccagaagctcctcgtaattaacacccgcgtgagaggaccacagcgacgtcataaaggcagtcgtgcgggctttaagctgctcactcagtcgaagacggcgtaggtacagctcgacagcgatgcagttcttgcggaatccaacttcgagatcgatgtacgatatgaagagacttgcgagctccccgatcacgtacgacatgaccaggagaccgatgaacgacatcacaatgtggaacacgaacacaagcgctgtcgtgggtgtagggatgtacgtcttcttgacaattgtggtgacagcgaaggagagtccgcgaagaaggcggagtgctagttgcttcgaggacgggtttagagggtcctcgagctgcaattcttgagatgggagccaatcttcccagtctgaagcaaagcccactctggtggccactgctagataggcacaagccgaccaatatatcaccaacaagtacaacatcgacacatgtgagaagcgcgtgatctcgctggctacactgcgccgatttagttcgtccaggtatcgtttcatgttgagaatcttgacgcagcgcagcattttgaaccacggactgcatttgaacaagacagcatatcgtaaacaggaatcgtagcgatgaggtcccagtacattcgctctttgcggtacaatctgcgtagattttcatcgtaaagctccatagcgtcaggcgattcgcgaatgtgccagctaaaccacacgtccagcgcgaaaacgacctcgcacaataactcgcaacgtttcgctatcgtagtcgctgcagtcgcacggtccatcggatccatagtgagctcgtacgggatcaggatagagacgtacgcggtacaggatatgacgaatcggagccaaaacaagtgaatttgactctgcacgtcgacgccatgaagagcatagtcacacaacctggagagagccttgaggattgctcggtacatcacatttgggctgctatgatcgttgattcgttgcaaatgtgtgtgatgccgtatctccttcaagctctcagcgtgccaattcatgatatccgagcgtgacagcatgctagcagcagtggttaatccgagtcgttgttttttacgcgagaggtggaccagtcgcgcctgctcccggtgaatattggcgatgcgcagtactttttgcttccatttcgggtatcggtcgaacaccagctccagggattcacgcgataaccggtacaagatgcaggaggtgtgctcctggatgtacgcgtcgtgtttcttgttggtgaagaatgcattttcgccaaagtagctgccatccgagactttgctgactttcttcaactcgtctttgacggatttgtgcttcataccggcgataatatcgttctcttgggggtcagcgtgggatgacgcgccgtccacaacctccattcgcccggctaaaatctcagcgacgattttaaacgttgttttagtcggatttgctacccgggatggcaacaatacgtgtagaacccccgtaaatataaagaacatgtcacttccactttcgcccagcttgaaaacaaattcgccgcgggaaacgagaacttgctgaaactgcgagacgagcatgcgcgtaatagacgactccatgcccgtgagaaattccactttatcgatcataggcttcatgtacaccaggcgaatatctgtgagcaacgaagggggaagacaatgcacgaggatgtgctcctctgtgatggtgtggtgacgcttgaagagtagaaaagtcttcacacgctcctggagagcgtctgccatagcgaagtggtcgagcatttgacgcacagcgcccatcttggcgttaaaatttcgagccttggagcttgtgaggtcgattatgtccgtgaagttgcccaccacgaagttgcccaccacgtaagcgaagaggaagaatccagacgccatcgtgaccacgctaaagatgctttgagctgtggtctgggggaacgcagagttgcctgaagatgacattaggccgaaagaccagtacagagaagccatgtactggagcatcagcgaggccttctccaggtttttgcctggtaaccacgcgtcgataccgaacgccgtcacagtcgaagtaatgctcgggactgcagccttggacgcgaagttaaaccacatacacgccaggaaatgcgacagcatgaacgtgtagtaaagcagcttgaacaagtgcagctccgtcgttagcttcagatatcgcgtttcaagagcctgcagctgtctgggaaacttgaataagcgcagcagcttgttcacgttaattagattccatcggtagtggacaggcacctcccagttgacgacatatagcggaactaatacaacaatatccatagcgaaggttcccgacttgagatacttgtgcttgatgcgctgtagctccatgactttgtttccgtactcgtaaaagccaagacgggatcggacaaatgtgtccagaagaaatgtaagctccataaaaatcatgagcgcatccgcagtcttgtgctcgtccccaacggaaagcacatttgaaagctgatctgcacccattgcaccgtcattactacaaacacccacgtctcccatatcaacgcaaatgtcgagtcggggtcctgggcaagatccgataagttccgtcgcggtgtcagctcattcatggctcgttgtgctgcttgaatgtcaggtgttccgtcttggaatgtgctgatagacctgtctgagcgcttcttgctgagtagccgctgaccatatgaaagcagctctgcattgaacccagggaatatagtatccatagtttgcaactggtcccgaaaaacaaataacagaatgcaaccactagtagcgctcacgtgctccgtctagccttctccacgctcctgttcagttagtgcagctgcgccgaaataccctcctcggggtacttcgcatggcgttccgcccattttcacgatgctgatctcccctgcgagtaggaaatatatccccgtagcatagtccccgtggcgatatatggtctcgctctggccatacagcacgaatttagcgttttcaatcaggatttcatcgagggattgactggctgagtgcagaccctgcagttgtcttagcgtctgcaatatatgcgtgcaaatactctgcagcaactccagccgaattgatcgaggtaaatctgctaacaactcgctaatcacagcgccacgatgcgcggaccaccagtaatccaggaacgacttggctcagtgatgaatcagtatcggaacatcttggcggtgaaggaaacgccgaatccgtgtactcgtctcgaaaaattctttctgctcgaatgcggaggcggtaaagcgtttctgtacggtgtcgacgataatggcggatactaagaagcccccaagcatgaagagcaacgccacaattaactgtagactactggtaggctccacgctgtttccaggagatgtgaacacgcccacagctacgtaatgggaccggaagtattccgtggccgtgacggcgtctagttcccttcggttcacgctttcgtcgagtattgtgccgttgcaatcatccaagtgtgttgcgtttagcctgcgcaggcaaagactgggggggatatcctcgctttcttatcattcgggctgaagccttcgatatacgatacgccaaagtgaatacacgtgacgacgtggcaaatgatgaaaaacaacagcccgaggagaaatagttgccgtctgctgctcaagcagatgaaacacgcgatctatttcaagtattttcccagcctccacacacgtagaagacgaggcagtcgcatcagcgcgtacctctccacgtagaaatattcatagggaaatgcgcacagcaaatcgaagaatagttcgcccttgacatatcgctgcgcggtgaccatcggatccataattttgtcacgagtcggccgtgtaagacagattcaaattcaaaatgaggtctacgaggagaccagcgtttgaaatggtgtcagttgtctgggtgatcagcgttgctcgctgccagagcggaaacgtaatttggacgggcaccatcagccagcagtataacatgttggatagaagcagcaagagccaccacattcgcgtccgagactggtggtcgatgcaccttcggaatagcaacagacgccacattccctgatgactgtaaacatgagaaatagcggggccctgctgatgaggaagccgagtcggagtcattgttctcatgaacggagccgacgagccagggggagtttcactcgtcaatgatggcatcagttccgtggtgatctcgcgcaagtaggacccggtgtacatgtgtgcttctttcggccgagggatatcgagctctgtcgggttgatggagttcttcctcgctcacgctacttcttcttgacaaggccttgacaagattggacgtttctgttataactcgacttgctctagaggatcgccgggacttcagagctcttgaacttcctgcaggagtgctcgaagtggacgatgaagcctcgctggcattgttgtccttactgctgttggccttgcgaagcatatagttcacatgacccgcgatcacaccggcacagtcgggatatccttcaagcactcgctcacagtggaaccgcgacagcttgcacaaaattgcgtatgtcgccgatattactgtcgctctgcttggtatcggggagaatacgaaaagttctccgaaacacgagccttttcgaatctcttgtacggacacggactgaacgagaatagcgaaaacccccgagcccacaacgtacatcgcatgaccgtacgtctctggagaaatcaaagttgtctgcgcaggaacggcaatcatctccaaaaggctcgtgatagccacgataaatctgtcactgtaaccatcaaagatcgggacccgggcgatcgtcgacttgagcagttctacctggatgtcgttggctattgacgggcacaggatcttggccgtgtcccgatccgtcgactcagcatcagtgtaatagcgctgtgacaacaaagctagtagtacttagttcaccaaaacgttttgaaaataaattagagcgagtcttacctggaggtactcaatcgccttcgcttgttggtattccggaaccctgtggaaggagagtacatgcacaagttggtttattcgtgcctccaccgcttcagtatttccgctttgacacttggatatcacgaatatcgttgcgcatattgtcacgaacacggaaaacccgcagagcgccaccagtatcgtaaacagaaactcggagatgtggcgcgggatttccccttcaaagtaccccgtcatgatccccacgctccagaacagcgccgctaaataatctctgagcagagactcactcggccgtcgagtctgtggcagccacaaattcgtcccgctctcgtcgtagccgaagctgtgccgcacgcacgccaaaatgtgcgccaggtacaccgtcgagaccaagaccttgagcagtttaagcgcgacgaagttcttggcgtacagctcgtccagaagcaacagaagctgcggcagtcgggaccatcggaatagcttcaaaaacatcgtcttgagcacaatatccggatacaccagcaccaaggcctggcctggcaggatggccaccagatccagcacgaattgtctggagcagaggtaccttcgtcgtgtatctactttgtctcggatgaggttgccgtcccgatagtagcccgtatgtgcctgtacgaacaggtccagagcgaagaacccctcacaggccgccagcagcaggaacagcagcgaaacctgctccatggccgagggctcgaaggccaataaatacggcagcaggaaggtctcggccaggatcagcagcaaaagcagttgactccaggttgtgcagaccctagaactagggtccagtgcgtcccgccggtcctcggccagcacgtgcgccacgcgcgtgtgcaggctgaagggcgagtgcacgcggctcacggagcgccggctcatggacgtcatccacgagcgcttgtcgctggccttgctcacgcggctgcccttgctgctcttgctgcggctcaccggcgtcttggcgagcgtctcgaccatggcggacaagcaagcacaggggctgaggctgacggaatcgcggagtccctcgaggttgccgcgcacgaacatgggcaaaaataacattaggtgccgctctctttgggttttattcttctcgcagttccgcgtaattttagagctaaactgttcttgaggccgcggcccctgtacctgcaaagtttgctaactctgaaacttggaagatgtacagttctaaatatacaaattagaattccggtattgctccagcaagtgtttcagactgaaagtttcagtttacaaatcggagtgcgcaaccgagcggagcttgctcccgccgccttctttgagcagtacgagcgtttctttatccagctgtggaccatcagtggaccatgcgaggtgctggacggcagatctaggctcttcccgagggctagcgagctgatctatcggccgctcccaccttacttactcgctggctgtggcccctctcggccacttggactcgcgtcgcccagctcaagtgacgggaagtgagacgcgcattctacttcacgaaaccaccctcctcctcctcctgtccggaaataccctcccctccgtcctgcgtagactaaaatgggggaaagcagagcgaccacagcgtgaaacccccggccaccagagacgcctcctctctatctcgccctgcccaggcctcagagaggttccgccctttcctcggtggcaggagcgtcggtgacactacaaggacgaccgagtgccaagtcccccgtccaattgatgagaggatgacccagaaggtgtacgcggcaggagtcggcgcagggccaagaccctcttcagtgacgaccttcgcggggccgcccgtcagtggcgactaccctactccagactaccgacccaagcttggtgctaccagaccctctagacgcagaaggtcgtgggggtacacctaccaccagtgctttgcgccgctcgagcggctctacaagcgcctctcctggacgacgaggcagaccgttcgagtcgggatcagcctctgcgccgtgctctacatcttcctgactgttcccttccggatagccttctactacgatccgtacggtagaacggaggcagttcatctccatcggtggactacggagctcagcatttacgcggcgctggatattgtcgcggacattattggagttgtggagtttgtacggttctaccagctccagagggggctgttctcccggtttgccagcttcgacgtgcggacggcctcgcgcaacgacagcatgttccgctcgatgcgcgtgatcacgcgcaccccgtcgttcaacatgatgcaccgcgggaagaccaagtggacgctggcttcgattgctaaatccgcggtggctcacggcagcgcagcggacgactcgcactcgcagcagaattacgtgagggcgcgtaaaattgagctactgctggagattgtagcgatactaccgctggaggtaataccctacgcgtcgggggcgtacaacgcgctgcacttggttcgaattacgaaaatttgtcgactatatcgattgcgacgatgtctcgcgagattggccagcatctactcggatcgcacgtgggtgcagcagctttcttctacagggattgacagtcttgtgcgaaatatcgcgctatgcgcgggcctgtgtcattacgtggcttgcggatatatgatgattgcccacgcgcagtgcagtattacactggagaattgcgacgagaatgtggagacaagttgggtcgtccgtgaccgcctttttggtgcgtctgtggcgcggaagtactcgcggacgttgtattgggcgtcacgtacgatggtactgctgggttacgacgatgttacaccagtttcagatatcgagacagtctacgctttggctgcgacgctcatgggcgccctctttgggtcctcgttgctagcaacgtttctcttcatctttcggttccgaaacgcgcgctatgccgcgtttactacgcacgtggacaacgcccgggagtatatgcgctcgcaaaatatcccgcgggctttgagacgtcaggttatcgcgtacttcacgtactcctggaacacgcaccatagtctcgacagcgaggaggctctgcatctcatgcccaagcacttacaggccaaggtggtgtccacgctgaaggcgagccggatcaaacaggtgtgttttctggtgaaagagagcgttgaattcattaacttgctggcggcggcgctggtacgacgagtctactcccctgacgaccagattattgagcccaagtttaacgctcaaatgtttttcgtcattcgtggccgggtatttctatccgcgttcgatgggtcgaatgccaaagaggtgcaaggcggtgaccattttgcggatacgtgtttgctcttcccggagaaattcgaggagaaggctgttgcgaaaacgttttgcgagctttacgtgctggcaaaagtcaagtttgatgacgccttggatgatttttacagggaatccaagactgaagtgagggagagaatggcagaaacacttgaaaagtactcgacacagttgcgcaaaaccaagaagctgctaggaatgcggaaccgagggggaagtggaggcagaagttcgtttgcaggaagttcgcatagtattatggctacggaagacacacaacacatgcctgaatttcgacacaaagtgagctggagacttccgggatcggcgtttcgtcttcactgggatacagcgcgcctgtttgctatcatctatgtggcctttgaggtcccctacttctctgtcttcattgcaatgaaggaagatgaagacatgttcggggagaagcctgaattcggtcttcggtttgcgcttacgctgatgtttgaggtgttttttggagtgaacttgattttacggtcgcgatttctagcgcacgtagaccctatcgtgatgctgactgtggatgacccttttcttattttcgcagcgtataaagcggatggattctaccccgatttaattgcgtggctgccggttgggcttgtgctggaggctttagctacggcgtcaggtcagagctactcgtggttctttcgtttgcttcgtttgctacgcctacgagaagccccacgcctactctggaacgtctgcgactactacggcgtcagctccaaggcccacctcgtcatttcgctgctgcttggggtgacattcatgcttcacgttgtgggatgtgtgtggtttgaaatggcgtggctcccaaacgtagtagcgctagagaacacaggcgagcatgggatggcggagatgactcggctcgaatgcctccaacaggccacgctcttcgagaattgttcatgggtgaccttcgactgctacgcgcatatcggcgacgtctttccagcgcaggatgcagattcgtcgtaccaggcatcttttgcgtacatgcgctccgtttactgggcaatcgttacgctcacggcggtgggctatggcgacattgtggcttactcgacatccgagagttttttcgctgcgttctggatttttgttggcgggattatcaatttcggcgtcgtgggcgcaatgtccagcactatctcaaatgcgatggctcctcaccatcaccatatcgagaagctcaatactgtcaatggcattctcgagcgcatggatatttctgaaaagctgagtgctgagattcgccgattttatcatcacgaattcactgagcgcaagaaagcgtatgagtcgcagttgctgtccaatctcccggaccagctttgctacgaaatctcgtcgttgttgcactctgaagctgtaaaaagtgtcgcgctctttgattcggccagtattgagtttctgaaagaagttacggggaaatttcgccatcgaagctatcaaaatggagatacaatttgtctcgaaggagacgtttgtcgcgagttcatggtgcttctgcatggaagcaaagtcaacgtgttcttccgttctcgaaaggtacccattcgcgctcttcacgagggtgactgctacggagtaaacgcgtttctgctcaggtgtgcacaccccgccaccctcatagcagcctcgattgtccatgcatccgtcatgactcgggagcagtttgacgtcatccaacgcaagttcgaagacgatttacgcgatatgcgggaggaagcgcaagagctctgggccgagcaacaggctggtatgcgacgtatcatccacaacctcgagaaacttaaactgcaaccgcatctgatgtcgactgctacgctgttttaccagggcgaagtgaccgtaacgagcactactagcattggaggtgggggccagaagaaaaccacgcgagatccctacgaaacgcgcagcttgatcaaaagtgtctggaatgcgatcatcactttctggaatacgtacaacgcggtgtttatcatcctccgcatttgcttccactcgcactttcatttctctagtagcgccaatgccgctgtctggatcgccgatctcagttgtgacgtgtgtttcttgcttgacttgtacctgcggctcttctacttcgggtgctctgaggccaatttggagaatctggtctcgcgaagcgagatcgacaggcagtatcttcggagctcgacgtttaagtgggatgttgtcgcctccttaccgttgtacactccattccaaagcggggcattgatccccagtctctgtcgactgccaaggctcgttcgctgtgtggatctgtgggaatacttggacgacgtgatcgtgcaaattcaacagcattttgcgacgcataatgtttcggcttacctgagccccgccaagttgatgatcattctcgtattagtggctcactatgtcggctgcatcttcttcttggtgtccgagcacgagtgtgaacaagtggaaaagtgctggatggcgcacgatcatttgctgcacgcataccatcattcagtgctgatgctctacgccaagtccttctattgggccatcacgacattgttgctggtcggatcgcgtgaaagtgtcccgcgcgacgctgctgggaccgtctggacaggcttcacgtgcttatgctgtaccttcatcatcggtcatatcgttggcgagatttccgagctcattctcgaacttggcaaggaaacgaaggagtacaagagccgcatcgccagcttcgatggcttcgccaaggagcacgaactacccgagggactacgcaaaagagtggggttcttcttcaaattacagtttcagcacactgaaggcatcgacgtccatggcacgatgcacgatctctcagcgaacctccagctcaagtttatgcttgaaatttacggccacgctatcacgctcctgccgatcagccgctttctgtcgtcgtcccaggtcaacaacctcgcgctacgtctgcagtccgagctgttcatcccgggggataatattctcgtcgaaggcacctttggaagtcgactgtgtatcctgcgtaaagggctagcagctgcgttttggacgagctctgtgaccagtgtagccgtgcttatggagaacgcagtgtttggtgaagtggctttcttcctctctgcccagcgcagactagcaacggtcagagcgacaacgtcctgtgaagtcctgtacattatcaagcatgactggcaagaactgtggacgaccaccggggaccagtcggatactcaggtacaaaggcactcgctgcacgcgatcctcgactgggttcacgcccgcttgctccgctatcagcgagctagtctgcgtgccgcccataaggccaagttgctgcttgcgactcgtcatgtaccaactcgacttcacacagcggccacagcggcttcaggaacaatcaaggccaagacgcggctctcggctgtgttgctgaaccacggccatgatagcagcggggctcttgccccgcccaagctcgctccaccagcattggccgtgccagcggaaaccagacgcgcctccatcgcgtctgaaatacagctcctggagaagaaaaccaggtacattcaggcgaagaccgagaagtgtgccaagaagtttcatcctgccattgctgcgatgcaaatttctcgtcgttcttcctcagtggtctcgggtcggagcgttcgtaccagcgtcacacactcgagcaaaagtagagctaactcgagcgggatgtatcgcagcatgattggggacacggtcgccccgttgatccacagcagtagcagctcgtgtcttgacattcgcatcatgcagttcatggtcgacaccagtccggtcaacaagcacttgcgggacagtttatccgacgaacatcttcgcagcattgagatggagtgctgggtacgatacaagcttctcgcatcggcgcagtatggcgtctgcaagctcctagaagagcttgcgcctgcagagacgccgttcatgcacaccccggtcgcaccagggcacgctgctggctcgggcggacagcagcgacaggtcaagattaatccagctcggaacaagctgcttcgagcgcgatcgtatcgctacgacgagcatgccaaccggaagcgagatgttcaacaccaagtgatggcaaacctgatcaacaagcgatcggccgcgccagaggctgtgaagaagtggaaagctctagctgttgcagctgcgccaaaactaggcgctcgactgtcgaaggaggctggagtggggacgcgcagtcgccgattctcagtttcgcagcaagtaaacgccccacagggacagcagcctcaacaactcgcaccagtccgatcggaacagacaaagagacttgggcgcatgatgcgctgccgctcactgcctaacttcgggcgcgcctttttcgagaagttgaggcgcgaggatgacggacacttggccatgagcaatacccagacgggcatagactttgagaccctgcagcgctgccagcgaccagaatactctgcgcagctcatgctgttcaaccggtatcgactgtggagagatcgcagtcggtcgactgttctaccggagcatcagagcacaactctgctggcgattagtcgccgtcacctaaatgatgcgattccacggacgccttcgacgcgcgagacggtgattgacagcagaaaccctcggtctgctgccgtggggtcccgactccagctttccaatcagcaagcgctccgtgctgccacgagagagctcaaggccaaagcgttcatcaagacggtcaagcagatggggaaagtgtgggacttcatcatgctcttggtcgcaatataccacatggtcatcacaccgttcaaggtgtgtttctcgcatggtcttacggagctacccggtggtgtcctccgtggatggtcggggtttgagatcttcttggatttactgtgcgtcgctgatgtaacgtataaaatccgctccagctctacaaccgagggcgacatcacgaacttgaccaaagttcgtcaaacgggctttcgacgagcttttctctcggatccagccttgcgcagtgacatcttcgcgatgctcccgttagagttgttgctttttgccgccgatgtgcgagtcccgcgcgtgttcagttcgtctgtgaacccagccaatgcttcgtggtggacaacccgctggctgttgcgtatgaaccgagttcttctcgtgagtcggatcgaacccctcacggagcaactgctccaatttgtcatctacgactggaaaatacccttaaatgaggggttcctgtactttttgaggggattgtcgtcctacctcacgatgggccatttgctggcctgtatttggttcattacgagtgatctgggttacgatcattatggagcgtcgtggctctcaacttcgggtatgctgacgtatatcagctcaggaacgacacaggaagagaatgaacaccgtatgcttagcgaggcctcgtcaagtttcgatctgcatggcgtcccccttggacgcaagtatctccggtcactactcttctcgatggagtgtatctcgaccctgttttatggcgatattttgtccatgaacccgcttgaattgatcgcagagatcgcaatcaccctatggagtatttacatctacggagcactcgtaggtgcgcagggcgaactactggacactcgagctcgccgcgaggccgcgtttgaacagacactaggggagttgcagaactacttggtccagaatgaggtgcctaaggggatcaagcggcaggtgaaggcgtactacgcgcgtctgtggcggcgtcgtaaaggtgaagctgagttcgctgcagtggagaaggtttcacgagcgttgtacgaagacgttgtgttgacgacgctgcgtagctttgctgtgcaagtccgagcctttcgcgctctcgacgaccaattcatgcgagcgcttctggtctgcttgcagtacgtggtgtgttccgagaacgaggaggtgttcgtggtcggggacatggatcgtagcatgtattttatcgcgcatggtcgagttgtcgtcaagatggggtcgagcgagagtgcgcgagagaggggggagttcttcggcgagttagcgttgctctatggtatctctcggctggagacgtgcgttgcgctctgtgtgacggagctgtatcgccttgaccatgaaccttacgagcgactgctgctggagtatcctgagtatcgtggtcgcaacaaactagcgtggacgacttactcgtcgggttctgcccgagatcgctccattgtcgaggaagctttgcggtgcttccgagagcacggggctaagcgttcgcgtaagcagaaagggccgaaattgagctcgaacggagttcctacgctgctaaacgtggaggaaatcgcgaagaacgccgaacgaatcgacgcccagttgccgcactcgtacatctaccgctcggcaatggagttgctgtcgaaattgagcaaggtggacacgctggaagccagagatctgtacctcaaaagccgggatggggctcgaagacagctcaaaaccgcgttagacctcatcacagcgcgcgcagaacctgcggatgatgtagtgcacagtttccactcgcgcagtggatcgccgacgcctcgcgaggaagctcacgagaagcatagcgacagcattgagcaactggaggcggcagtggcagagttgtcgacaccgtcagacgatcacaagatcgaatcttgagactactcggaaggcgctcgagctccccagtaatcacgcagctagggccggatatgccgtcccatctacttcatcgaggaaacttcacgttgacagaacacttacccaacgaatagattgaaaacgaataaccttttcaatttcaaaatggcaaaagagcatttattccgtaaactgcagcaaatttctatcacgaaaagagggcatccaggcgaaaagtttaacagcgagtaagctctgctacatgtgatcttgccaccatcaaagcttgtgccgaacttcgcaggatcggctcctaggtatgtacgtcgctaatagttcctgagaattgtctcgacccgccataatactcgccgtgtcgccgtcttcgtcgttggtctgctcgtcgctcgtcgtctggcacggcagtcgtctcgaaagtggtagcagtggtaacctcgattctcattcggcattttcccttcaagccctcaagcgcctcaatatcactactcgacctcaagcaagcatgcgtctctccaactctctcgtcgtgggtgttgcggccgttctcctcgcaagcggcaacgctttggctccagccacgggtgccggccaggctaccgtttcgaggctggcgtcgttggagtcgggcaatcagattgatggccttgccaatgagaacaagaggtctctgcgcggccgcgaagctgcggacaacgatgacggcgctgtcgacgaagagagataccagcaatggaaaatcatatgtagcaagaatttgtgcgactatcctgcgatcgtacttaatcgaagtggtgtgtgacttttggagctaggcgccagacgcccgcgggcgcacgttcatcgtgcccccgaatctgaacgccgccttggccatggatccgtacgccgacatactcatcaatccagacgccatcacaaccataaatccagacgccaacatgcccacgagcccaggcgccaccttgaccacgggtccggtaggattttttactacccttatttcaccctgaccggaacttttacccggacctttttcccgggtaaaacaccaggtcaggccaaacacccgggtaaagcaagagtgtgcattgaagtgatatttaatagcagtgtttaatgtaagttatggtgtgtgttgagttatgcaggtgcgtagctcgacgattcagcgcgtcgcagcatgatcgcagtctgggggctagaatgaccactcctccacgccattttcttcatctggatcgtggtcactgtccgagtcaaggaagaagttgtaagtgttagcgtggtcatcaatttcctgctgcaagtcttcggccgactgcgcatttcgggatggctcgtcttcctccgaagagtgatcagcttcgccactacgagctgattcgtcggagccgtcggacaggtcgccaagctcatcatagtcaccttcatcttccgactcaggcggaacttcaaatgttgctaagtcgagcaaggccgccaacacgcgcgccaaactaggggcagccggcaactcaatgcgtggtggacgctgtttcttcttgcgtagaccgcgcgtgatgttggcttgccgctgcgcgtaagcagttgaaattttggcaattgtagaaacaaagtgtcgaagcttggggtgggtcttgaacgcggcgttcatctccctgttaaacctcttcaaggggttgtttgtgcgtgccacgatagtattggcgataccaaacacattccactctgtgatgtagtatcgctcaagccaggtttttctaaagtaaacccaaaaacgtttccactcacggcgtgagtatggacaattgttcgcgatgcacctctgcttgatctcctgcttcacccaagcgatgcccttcggatcgacgaggtctggatcaattacagtgagaatgtccaagacgccagactccatagcgatagtcacttcgtcgtcggagatgcgctcgtctttcagtcgccggcgaatggcttgtttaaaatggaagaaacagcccaccacttcagcgttcgggaaccgggtctgaacagatgagatgaggctaaactcgaaatcacatacaatttctgcaggattgagctttttgccggtgtcgcggtagatgagatgcaggatatcgtcgtacatggactcagtctgggacgtacagagcacgaagtataccggtgtgaacaggttacacgctgggtcatccaccattaagatcaagcactggcgaaatcctcgtggtacagatcgaaaagtaccgtcgaggaaaagagatacgctgttgtagagtaggagctctttcggcgcaggatgggcccagcctagcacacgacttggtgctttctttaggatcggggtgggccgttaccaaatggaaccggaagaatgggatggccgagtctttcactttggagaagggagggacttccacaactccgtgaatatcaccaccgtagtatcggcggcgaatgcgacggatatgcccgataacttgctcctctgtcaatccgtctaacagctcttctctatcgggaccgtagaacgcctcgcatacttgctcccaaatgtcgccctctggcattgttggattttgggttgctagctgagctgtagttcgtttcattgcgtcggtctcatcattgagttgcccattcaataccgggaccggacggcacgtgtgttcaccctccacccaccaaacagcggccggggttactttgagcgtggccttacagccagaagtcttcgaagtactgcagcgatatgcaatgtgcttcgtcgagtaccagttcttgcaatatcgaaagcccttgtagatcttgatcgttttggaccctcgctttttcttggctcgtggcatgggttcctggctagcaggtggtagcatcatgtgatcaccggcagcttggacttggtcagatggatcatcgagggacagcgcttgcaactcgagagtgttcccactcgcatcattgccgaccttgcgacggacggagcgcttctttttttgctgggtgccctggcgggtcatcaagacgtctcgagagttggttgtggttgaacagggagctgcgcttgtgcggaaagcaggaagatggtatgtgctgctgccttaccagtattgccatggggccttcccatggggccttcccatgcgagaatgctgcggataagtatagttttgtgagagatttggataataatagtttcttagggtagatggcgatgtagatgatatatatgcccgcatgaacttggcaaatatatcttctccgggttattctcaggtcattgaaaacatgcgctctttttcagtaagaaagagttccgggtaaacgtgccggtcagggtgaaataagggtagtaaaaaaggtaaccacgggtccgaatgccgacatgctcacgaacccggacgctgcggatctcgccagtcaggtacaagcagtcaagcacaatgtgatcggccagaagactgtgaagacgtacgttcgtggaatatgtcgttatgtagcatggctttacaagaaccaaagaaatgttctgagcgatgcatgtcttggagccttgcaagatgacgacttcgaccctaacgagttggagatgacgtcgctaaaacagagcagcattgctgacttcatgactgagaatcctggggtatctcctattaactatgatcagcatcgcgctgacgacttcgagcagttcctgctgtctcttcggaaccgtagcggatataaacctgatcaatccgtttacgactcgatgcgttcaagtttgtttcatttgtatcgaggatatgggcggtcgatgacaccagagtttgctgctgatttgacggtatttttcaaaggcctgaaacgcactgttgcgcggcgcaaccacgatgctggtgtgaagctgacagagggggaggagcccatgtcattttcgctattgcgctctctctgtgctgcgtttatcaagcatggtgacgaagaatttctttttgcgcacgcatttctactgttgagtttgaatttgatgtgtcgcgcgggcaacacggcttcaattcattccggtcatatgagctgggatggagacgcgctcgcaattcttttcgggcacatgaaaaacgaccaagacggctcccggcctcgcgatgcaaggcacgtgtacgcgaacccctttgtccctgaaatctgcccagtgttgacgctagcgatgtatgctgctgtactgggaatcgacgattctaagatatcccccggtggtaaccaatatgatcaattctcaaagattttaaagcgcgtcatgcaggaagacgagatgaaggtattgcttgaaaatgaaggattggtaccttcagatattggaacacattccgctgagtgagcagcatccattgtatcgcatcgcgcttttcggaaataccagagtagtttcccagttgcaacagaaagtggttgaaatgtcccgttgtcgatcttctttgtcgtcaacagagcttaatgccagtatatcgcgggtacttaatgactgtggaatagctgagctagttgcagcggtccgaagccatttaccccagccattgggttgcactacagaagattctcaggaccgcctagatgtagatgataacgatggagtccaaatggctacacaaaacctgactcttacgaactcaagattgacgcgagcacctgctgattttactattcccagcatgtcgttaaggtgtgcttgggagcactggtgctgtggtgacccatctgggcgaattggtccatatcgcttcctgcagtggcaggacctttccacttgtgggaagcggaagacgctctcagcctatcggtgtatgatgatggagatacaagccaaagttccgcgaggctgctggatatcaaccccaacggtgcagcaggctcgcgaaatgcttcaaggcgctattccgaagtttcgtatcagcgatgtaacaccaaaaaatcgtcaaaggcgcaaaggtcagctcaaatggtctactgcattgaacgagattcgagaaattgcagtagatcgagccaagacgcgtaggttagcgtcgaaacaccaacacacgtgcatataagcaaaagataattcagctcgtcttacctgacgtcgttgatgcagttgccgaggacgagtagtatggagcctaatgggcgctggtgtagccagggcgcctggccacgggttcacgctgcattatacgaaggcaatgcgcgacgacgcactacagacaacgacttacaaagccggcagacacaaaaagccggcagacgaagtcaagcaaagcttaacatgagcaaaccagccaatcagattcaatcaaatgacttcatctttgtataccatctggttttgtgtactttatatgctttcttgtgtactttatgcaacacattgtgtgttttatgacagttttacagatttgacgggagggaatttatcgttgtttttatataggaggatggcattaagcatgccggctttgtaagtcgttgtctgtactgcctgtcgcctcgaacttgtggctgtataaactgcggttgttatgcgcctgtgtggtattgagtttcgaggttcacagtagtttttctgtgcgtttgatgcacacgaattcgttacgactctgcatttccaccagcttaacagcagtttgtacgcgcagacgcacaggaaacgcaaaagttttgatacaaaaatgaggtcagacgcacatgaattcaagagaatcgacgatttggtcctagtgtgcgcaggtacacgtccacagttaccatgaaaacccaaggaaaccgtggatgttaccgtgtaccagaatctgataacacgtttcctgctcatgggacccccttcgccaggaagcctgaaaggacccgataaaatgttacaggtgaagctttgggatcttgacttcaacattgcttttgaagacgacctttgaccatgcgttggctatcgtgggatggatagatagccttatgcggtaaatgatctgtgcggtaaagctattcatagtcgagcactgttgcaatattgcctcattcctcgattttcttcagaagccgcacccagtcgtctacgtacacgctagcacttcctcttcgtcagtatcgctgtttccccgtctccaacataacaacgatgcttggcagactctctcgggtacttccacgtcgccaacggcagggacaaaagggaccaggcaaggtctagtgccgttggcaagtctggttgacgagcgatcggtgtagacgaaggatacagcaacagcgacgaagaagtggggtagactgatggtgaaggcgggtgtagcattacatgtagtgaagtcgacgtggagagctatagcgcgacattccaagcctattaaatatagggggtagtaggtaactgtgaccattgtgaaccaagcggtaccaatgttactgttactgtgtacctcgccgaggaaacagtggatctgcacacactatttggtccagggtaagtggactgacctctttaaaatacggaggggcaaattccactctagggccaccgtcgaggacaagttgctgaagcacttgagcaaggatcaggtcgacactattctcacgtattactaggcggaacccaccctgcgaggttcggtacctgcttcagcggtcttgaagcacagagaggctaaccaatggcattggtggctttgtcacgtgtggcgagttcttgatcagagataacaaaaacagcttgagagaatacatacgctgacaccttttctcacccagacccatttttcttttttttacgttgacaaccaattactttgatatttatctggttataatttgtttagccgagaagtgtctggtcaactttaaatacagcaaatcagggtgtttccgccacaatgggcaagatgggttccaccaatgcggggagatcgcgtgcagcactataacggtcgttgacaatggagaacggagcactgaactctgaaataaacctcacattatagtgtgagtaagtagtttccaccgcagtgtaacggaggtcggaaacgcgtttttcgggttcgacgtaaaagaaggccatgtacaacgacttcaacacacaagatcgcatcagggaacgagtccgacaagatgccaagctccttcccaaggacgacgagtccatgatgctgttaacggcctcctcgggcttgttttgtccgtcttgtcccagcgacctgaccaacggaagtctaaatctgggtgcacggttcaagcggtagtgtcgaggaggtcgagtaggtgagctgcttcattcggtctttcgctcagcgctgagcgattcgaccatgtgcgctcgcaagtaggcgacgcagaattttagccctggcggagacggcgaagcggacgggtcaagcagccaaaaccggccaccacagaagggttcacacggtttatccggctggccgtccagcttgcttcgacagcgccaacgctatctgttgtgggcgcgcgatggcacaagtcgctgcctgagggggctaaccagaagaagactgaagcgtgctcagctaagtatttgtatctgatgtttgattaggctgtgtctccaggtatagcaacgctcgctcgatctactcaaccccccgggccgtttagcggaggaataggcggagatggcgtgtcgaagacgctcaagcatgacaccatctaagcagccgtgaagtggacgaactacaagcagtgattgctcgaacacccatcattgggtggcatcatgctgtgcgtggcgggccatttacaaggcatactcgtgctcaaaccgaaggggggcctgtgggtggatcgagggcggagcagcttgccgggagggcggcgaacaatggagcacggttcgttcacacgttcaccgctctagttactaacgaaagattgtactgtgttgttgtttggccagagcacttcattcccagtcaactcggctaaatgtggggtgcctcggcttgccatgcggttcaagccgcaccgaggctagcctcattaactgaaaatgaagcagctctagccccacatggattcttttttttttttaaataacgttgaggtgtattgagttactggccttgtggccgaacaaagattcttgcacaagagaggaaatgagtagtttccaccgcagtgcaacggaggtcggaaacgcgtttttcgggttcgacgtaaaagaaggccatgtacaacgacttcaacacacaagatcgcatcagggaacgagtccgacaagatgccaagctccttcccaaggacgacgagtccatgatgctgttaacggcctcctcgggcttgttttgtccgtcttgtcccagcgacctgaccaacggaagtctaaatctgggtgcacggttcaagcggtagtgtcgaggaggtcgagtaggtgagctgcttcattcggtctttcgctcagcgctgagcgattcgaccatgtgcgctcgcaagtaggcgacgcagaattttaacccacccaccattcccgagggggtgcctcggcatgccttgtggttcaaggcgcactgaggctagcctcattaacccctccaaaccgggtgctgcataatgcagcttagatttgaacctttaaactgcatatatgcagtttaagaaaaaaatgacttggtttttgtatgatttgtattttcccatgacaagaggtatacaaactttaagataaaagtttgcattgtttctgtttacgcctttctttttcttacatacgaagggccactcatttgtctaaattcgagatataggaatttgcagttcttgaaaactgcaactgatctgcgactatctttggagggttgcggcacgttccgggcacgttcctgcattggctggaccacgccgccttttcgaattcagcctcattcgagaatatgcggccggaggaagtatgtcaagtcaaggcgatggtgaaaccgtgtggaaagatcctgcgcgactgcgaggtcacagcgcgtgatctatcgttcaggtccgtctggcgagagctcaaagctcaatgctggacgcggaaggtgccgccacgacgaagtctggacgatcgctacttctacgtcagacccggcggcagtacaagcggggcgtcaggcgtcgactacttcatgggcgaggagggagtgctggagtattatgcgaacggtgggtttatattgaatgatttgtatatatacagaactgacacaaatttactgctttacttctagttcttcggagtcgtgcgcgtgtccccgccgcgacgtctgcctccttaccgtcgacgcaacttgctcctggcgacgcccagttggaagctgctgctcatgttgtcaaagaaacctacggcgctgaaatcgaagctgcagaagcccgagtgcgcgaacaagcgcgagtccgagctgctactggctcactggcctcttcgagctcagtaccacagcctacaccaagtccgctacctgctcggcgtcccagcgctgacgtggagacgcctccagcatcaacttcgcgtccggtacctcctccaccgcccagctccagcaaggagacgtatcccgctcctgtatctcgcggccacggaaagcagcaggcaagccgctcggtccgatggtcactggagccaccatcgacaccgtcgacgccaagtcgtgtcaaccgtcgaccttcgcgagtattgatcgcgacctcaccgcatctcgaccaaggtggatcaagtgatgatgacccaatctcgagtgctgcgagtgcacaagaagccgtcgattcctcaaacgactcgagtgacggtatgttgcatcttatgctgactgatatgctgcattttaaacggaatattatgcagcattttatactgcatgctatggtgtatcgtattctgcatactatcctgactgtattgctgaatactaacatgctgtgttattcactgtagatggtgcagtcactcatgaaagcacaccgggcgacgagttgctggccgacaacattgacgacagcttgaacaccgtggatgcagctgacggtgcatcattcggagccatggaatccggggatgaggctgagagagatgacgtggagactggtgagtacggctcggacgacgatgcggagcagtgcgcagctgaagatgttcacgatgatcctgatgagactgaagaggaggtggctgcagaggtgcttttcgctgaaaacttcctcgagtcatttggaggcgacgacgaggttctcgccggaaacctggagaacgatgtcctgcgcaacatgactgccacaggttgggaagacgttgtcgagcccgacatccacaagcacttgatggctccctacgagcccatcgacaacgcgtctagctaccctgctttgcgccaaggctactcggtgccaacagcggatgcgcttcggcgaggtgactcccccgtggcgctattcttctatttcctgccagtggtgctgtggcagcacattgctgcttgctccaacgagtatcatcgagagatgcttccacagcgcatcgacgaaacgtatcggcggtaccgacggaagcagcgcctcaattcagacctaccgaagaagacacgacgcgacattcagcacgatttggaaggaatgaagcctattttacctcacgagttgtgccagttcataggcttgttggtggcgaggacgattgcgcccaatcgcgaaaagctttccaaccactggaaaaccgctgacaaaggtgtcatttcgcgcgggtgctttggctctgtggtctctcgcgaccgtttcatggagatctctcgaaaccacaaagatccacgcgctcacacggatcgcgcttggaagatccgcaaagtggttgaagtgcttcaaaggacctttgcgcgttggtatattgcgcctttccaccttgcctttgatgaggctgtgcaaccaagtcgctcaagtttccacaagatgcgtgtctacatgaaggataagcctcacaagtgggacacgaagctctttatgctctgcagtgctgtcacagcgtactgcattcggtaagcttttttttggtcgattcaactcactatactgtattatgcagtttaggctgactacttctgttttacttatgctgcatatcgacaggtttgaggtctattgcggcaaaaagcagcacgcaagtgatgcacacaagccggatatgaagtccgctcccgccgccgtcgcgcggaacttgctggaagtgtttggtcgggatgccaggaagcaaggaatgcggctcgaggtggttgaccgcttctatacttcagttgcgctcgcgatccagctactgctgatggttttttattgcgttgggacaatcatgacgaatcgacttgggtattgcaaacaagtgattgagaagaagaagagcaggcccgactccattgctcgaggatccttcaaagtggccagatctcgtatggtgccgaacatgacggcaataagctggtgggattcgcgccccgtacactttctgtgtactggtggcagcgtcgagattgatcgcgtcgtgaagcaagatcggtctgagaaagtcgaggtcccgtgcccgagggtgatcaaggactaccacgccttcatgggtggcgtggacgtccatgaccagctgcgactgcaacgatattctctacaacgcgctctacgatttcgcaagtactacaagtcgttggtgctgggattgatagacctggctatcgtgaatgggtacattgtgcataaggcgtttcacaagaacaaggagtcacagccgctttctcacgtcaagtgcatgaagttgctgcacttgcagctattccagctgcaatcatcggacatgtatgaagggaatacttttgaacgcggcgccaagccacccaaccggcctatgctcccctatcgaccagcagcacccaggcacctaccaagcatactgcgcgtcaaagtgatgagtgtagaaaccaaggctctcaggcaaaacgtcgccagcggacctgcaaggtctgctccatccttcgctccggcgcccagcgtgcttccacgactacctacttctgcagcaactgcaacagcacaggcccgatttacctgtgtatgcgagcgcgccgcaaagtccgagatgtagcaatgatgtgctgggatatctggcataaagaatggatgaacggcaagctggtccccatggacaatggtaaagtgattcggatccgtgtcaaagccgacgaagactctgaggctgcgccatcaacaccgggaacgcctgcaacgccagcatcgcacaagagacgccggacaagccagtaggagttaagctgcatattatcgtgtcgttatgctgaatatgtgcaggataagtctgtttgcatcaccaatcgtttgcataagcgtaatcgtgtgtacaattcgctttttatattgtacctgtctactcccgtgctcatctcgttttgcatcctgcctaccttgtctgcgctcggtcacatctcaagcaccatcttggcagtccgttttacaaccgtttcaagatgtatgcttaccagtgaaatatttggatatttagctcactcagattttgtatggtgcaaacaacaagtagctggcaatcaagtgattgcgttacgttgtagaggcgacccccccacctttgtatatgcatctttgtatgggaagtttcattttccgatttttagagaaaccgtgctgcacccaagcggagtgtgctcaggttctgttcgagggctgcctcgtccctttcgtgataatgctattgtatgcagcataaagagtcatctttgaaaataagaatgcaggataaggcagttttagcaccgctcactcaccaaactctcatctcaggataattcccctcgccctcgcctagcccattgtatacaaatgtcatcccggtttggaggggttaactgaaaatgaagcagctctagccccacacggattcttgcacaagagaggaaagtggttttccttcctttacatgcgaggatcagtttggggggcaaagcagtacgttcttggttatcgaaggcagcctagggagtggtgtggtgggtctaaaaatctgatggcgcacgcggcgtcgtaccggtgcttggagttcctggccgtgcctgagtagcttgtgtccgtcgacgcgagaccgcgaatggccgggcaactcccaacgttggatgcagtcgagcggaatattggtgtgaggtgtgaagtgccacagagttgataggatcagtgtgtgagtcaggagtagtcttcctctcatcgtatataaatagcagtcgttcttggagcaaaggatgctaaacaaattcgtcttatccaagaaatgactccaactttgttcaactagacccatcagcacttccgtatcaaacacggcaaagtggaggcatccagataccaaacctccaagtccagctgaaagtccaacgcattagcttgcttcaacagtttgtccgacagctcaggcgaggtaacgacgacccctggccagctctcgttcatcaagcagttacgcgattgacgccatgtgttcctgtgaacgatacactgagtttcttggatatatcgccgaaggtgtcctacacccagctgcgttgtccgcctggtggagagcatcatggcgcctgtggcatgaaacaagttggccggctaagcgccaacatccaacatcgttaaaatcgttgctgcaggcctctctaaatcgcccgagctacactatgggactagatcgtttcagcgaaggaatatggtggctgtagctgagcctcgtcggagctttagactccacgtagctctaacgttctcgttcgcgtgtctgctagatatctacgatgccttctgcggctggacaagtaacgaaacctttctttcaaaaacactcgaacctaatgagaatacctgcagcttcgaacagcaacggcgctggcttcgtgggctttataacgaactcacacaaatatttcatcgggttgaaatcgcagtgggtggctctggattcacgagatctacagacggattcacgccaaatgttggtctgaaaatgtctaacaagacaaccttgttcccattccttcaacgttcgaccctaaaactacttttcggccccaaatctcaagaacgtgacgagcatcctatctgtcgtgacttacaaggtacaagtgcctctgatgtcaccacatttgtccagttttgcaagaaacaacggcaagtactcctacctgtgcaggatgacttgcaaatgcgaattgcgtatcgactgttgcctgtaaggtctcgattctggtttctagcgcaccaaataccaaatgttcagcagtgcccttactacggctgcgcagcaatcgaaaagcgcagcgccttttcctcgagtgccactactcaaacgaaacctggaaagccctctggaaggactggagtatcgttttcgtaggaggcatcagctggacttccatggtactcccccacaagcaggaaatttggtcaacatggtcccatcacagagaggcagtgctttgcctatggaatatagtgaggtgcgcagcacttagccgccaatgaactgagaggaacaaaatttgtttcgaggatggaggaccggaaccccttgaaacaacgatatcaagcatttacagcacattcagctccaactatcgacgcctcttaagactatcaaactccgaagatcaaaccaagttcaaatctctgttacaacggcttcggtattccaaacatttgggcgatttcatcagcagacatgacaacagattcaagcttcggcatgtacaactacacttagcatcccgctctggtgtggtgttccgcactgttgtcgagtaagtagcacattagttcacataaattgagaagtcagataaatcggtaatcgaacacatcttcttcctatagaacgactgctatttctatcctacaacagccgggtcagaaccgtgggtcgaaccgggttgccagctgacccgcctgtgacttgacggctatagcttgttggccgagttgcacagcgatcaggagcgcgaagtcttgacaaacgcctatccttcttccaggaaaacttaatttccgtcttcgccggaaataccgatattcaagccatgctcacacacattggggtcttgcagttgcatttccccagctggcatggactacgtgaaaattaactaggagttggggagaaaaatctgtagaagagaacaatccgtagaagagcagtatctagaagttgaaactgacaggcatgagcgctggggcaggcatgctatgctttccacttttgaatctactcggtgatcaacactctaggaagtgccagcttccctatcacagtgttcaagttattttcttaagcggaacgcgttacaacatcttggaactctgtggactgttgacgacgacagccaattactttgatatttatccggatataatttgttaaaccgagaagagtccagtgcccgtttggtatttataaggacgagtatccagtcacatactatttcatgggaaatggcaaaatatgtggcgagtttgcgtcgaatatatcgtacttagacgagtgcgaggatttgcatcgggttcactccaaacgacgaagtctaaaatggaaatggaagcctcagctactctttgtggtgaaggtttgtgcctgcattattgatcgctagtacgagcgagtcatgaagtcatgtagaaatatatattccccttccctttcgcatctgaaacccttacagcaagcttcttgtgcctcgaaaatcaacctcaaacatgtgagttctgtgtaaaaagacaatctacctgctagcctcccgagcaacatgttgagggagatacgcaagcgccatcgcggtagatgcactcctagtgcattttaaatcgctttttcgaggcggatatatcttagcacgtcggaaaggtcgcgccccgtgcgactaatctacatgtggggggctttggagcgctttcaccctcgacaaaatgtatctaacccatattcacgagcctgtaggcgtacctacagaagtccacaagcgctcttcgccactcggctgcatgttcagacgcacgtacgctgcggggccatcgcccaagcgccgccaccgtgcaccgcgccctccgctgcttgccacgaagcctgcaaattgcaaaatgaaaaagaatgactgcgagaaaggcagaatcagaatcagaattcgccacatactcgccacatatttcgtactttcccgtggaatagtaggtgactggattcactccgaaaagagtactcgtcctaggggcaaaaaaaaacatggcgaatgtgatccaaccacgagatcatagaaaaagtacgctatgatcaaattgaagacctgttctgcaaaagacccatttaaaaatattcccgctctggatggtgccgcgtttgccgttgtaccgccacttgacgtcttccttctccagcttgtctacgacgtctgcagggatgcccaccacaaggttcgacttgagcgtacggtgttggaacagcttaaacaagcgacgaacgaagccggtcgcgactaaggcacacatggttgacctcggtgcatggcctggacagccagttgctcgttgagctcgacgacgtctggcggcatcaagtcagacatcgtctcgggcaatcactcaaggttcaagccgtcatcgacgcggcaaccaatcgtggggcgtcacgcgcgcatcaagcgctgtggctaaatgtaagagcagcagcagctcatggagcagatagcagactgtagttcgtttggtttttagctttggccccacctcaatcatttttcatcattctccggccttcccaaggctcctttcctaccttcctgtccgtcgccgtcctcgcgtccgtcgccaccgactggagtatcgttttcgtaggaggcatcagctggacttccatggtactcccccacaagcaggaaatttggtcaacatggtcccatcacagagaggcagtgctttgcctatggaatatagtgaggtgcgcagcacttagccgccaatgaactgagaggaacaaaatttgtttcgaggatggaggaccggaaccccttgaaacaacgatatcaagcatttacagcacattcagctccaactatcgacgcctcttaagactatcaaactccgaagatcaaaccaagttcaaatctctgttacaacggcttcggtattccaaacatttgggcgatttcatcagcagacatgacaacagattcaagcttcggcatgtacaactacacttagcatcccgctctggtgtggtgttccgcactgttgtcgagtaagtagcacattagttcacataaattgagaagtcagataaatcggtaatcgaacacatcttcttcctatagaacgactgctatttctatcgtacaacagccgggtcagaaccgtgggtcgaaccgggttgccagctgacccgcctgtgacttgacggctatagcttgttggccgagttgcacagcgatcaggagcgcgaagtcttgacaaacgcctatccttcttccaggaaaacttaatttccgtcttcgccggaaataccgatattcaagccatgctcacacacattggggtcttgcagttgcatttccccagctggcatggactacgtgaaaattaactaggagttggggagaaaaatctgtagaagagaacaatccgtagaagagcagtatctagaagttgaaactgacaggcatgagcgctggggcaggcatgctatgctttccacttttgaatctactcggtgatcaacactctaggaagtgccagcttccctatcacagtgttcaagttattttcttaagcggaacgcgttacaacatcttggaactctgtggactgttgacgacgacagccaattactttgatatttatccggatataatttgttaaaccgagaagagtccagtgcccgtttggtatttataaggacgagtatccagtcacatactatttcatgggaaatggcaaaatatgtggcgagtttgcgtcgaatatatcgtacttagacgagtgcgaggatttgcatcgggttcactccaaacgacgaagtctaaaatggaaatggaagcctcagctactctttgtggtgaaggtttgtgcctgcattattgatcgctagtacgagcgagtcatgaagtcatgtagaaatatatattccccttccctttcgcatctgaaacccttacagcaagcttcttgtgcctcgaaaatcaacctcaaacatgtgagttctgtgtaaaaagacaatctacctgctagcctcccgagcaacatgttgagggagatacgcaagcgccatcgcggtagatgcactcctagtgcattttaaatcgctttttcgaggcggatatatcttagcacgtcggaaaggtcgcgccccgtgcgactaatctacatgtggggggctttggagcgctttcaccctcgacaaaatgtatctaacccatattcacgagcctgtaggcgtacctacagaagtccacaagcgctcttcgccactcggctgcatgttcagacgcacgtacgctgcggggccatcgcccaagcgccgccaccgtgcaccgcgccctccgctgcttgccacgaagcctgcaaattgcaaaatgaaaaagaatgactgcgagaaaggcagaatcagaatcagaattcgccacatactcgccacatatttcgtactttcccgtggaatagtaggtgactggattcactccgaaaagagtactcgtcctaggggcaaaaaaaaacatggcgaatgtgatccaaccacgagatcatagaaaaagtacgctatgatcaaattgaagacctgttctgcaaaagacccatttaaaaatattcccgctctggatggtgccgcgtttgccgttgtaccgccacttgacgtcttccttctccagcttgtctacgacgtctgcagggatgcccaccacaaggttcgacttgagcgtacggtgttggaacagcttaaacaagcgacgaacgaagccggtcgcgactaaggcacacatggttgacctcggtgcatggcctggacagccagttgctcgttgagctcgacgacgtctggcggcatcaagtcagacatcgtctcgggcaatcactcaaggttcaagccgtcatcgacgcggcaaccaatcgtggggcgtcacgcgcgcatcaagcgctgtggctacatgtaagagcagcagcagctcatggagcagatagcagactgtagttcgtttggtttttagctttggccccacctcaatcatttttcatcattctccggccttcccaaggctcctttcctaccttcctgtccgtcgccgtcctcgcgtccgtcgccaccgtgaattcctttgcatccaagcccttccaataggttataatgtctacgactatggccgcgacgttcacgaccaagctcaagcagttcaacggaactggcttctcggcctggggcacttaagtcaagctggtgctggagatgaaggggctttgggtcgccgtcaatgcgccgacgccgaccgaagccgagttgaagaccgagagggatgctgctgcatctgcggtagctcctgccggaacgtcatcgccggccacgccgctcaacgaccgagtgatgaagcagaagatggctgctttgatcatcttggcggcgctgagcgagaagctcgctgcggaggtgtacctgatggaacacccgcttacgatgctccgccacctgcgcatgacctacaatgacaagtacagcgcaagcattggggcggccaagcgcgagtatatggggctctatctggatggagatgacgccgtggtggagcacatcaagacggcaagacgtgtccttgatgagctgcaagagcagcacgtgactgtctctgatgaagagaagaggtagaacttcatccagagcctcatgcctgcttggaacggcttcgttggcgtcctcgagtcatgcgcgacgttcgaggccatactccaacgatgccaagcagaggcgatccggcgtgagcagcagaaggatcgtcgatcgacgagttgtgctacaagcagcggcaggacggctgctgcgttcaacactgagcaaatggccggcaagggcaacactaagtcgaagaggaaacgtgaccggtcaaagggcaagtgtttcagctgtaaccagatgggacactacgctcggaactgcgccggggatccggcgccgtaaaccgtgaaaaaggaagcggtcagtatgaccttctcagtggaggacatgacggccaatgacaagcgggaatggattgtcgacagtggtgcgacaagacacatgactggccacattgagaatctcgtcgatgtgcacaccctggacacgccgcactcgctcaccgtcgcatccggcgagacgatgctggctaccgctatcgggaaggctcctctgctgcgcaatgggcgtgaggttcgtgtgctgcaggacgtcctgtatatgcatgggctcgctctcggttgcggctgcgtcgcacaatgacatggagatttcgttcaaaagcgtgtcatgtgtgattcgcgcgaagtctggtgtggctttggaagcctcatgcgccaaccaccacatgtatgtggtttcggctctgagcgggccaagcgatggtgccactatgaggacggccgaggcggcacacgtggagacatggcacagccgcctcggccacctcaacatgcagagcgtgcagcaggtccttgtagatctaacgctaccctggggaggcgtcatggagcaagcgtgccccacttgcgtgagcggaaagctgacccagaagccatttgctcctaaaagaccccgcgagttgaagaagaaccagctcctactcgctattgactacgtcagaccaatgtacaagagtttaccactccgtacagcccgcagcaaaacggcaaggtcgagcgtggcaatcgcgtcatcgtggaaatggcgaggtcaatgatgctcggtgctcgtactgggcagacgctgttgtatgtgctgcgtacgtgtgcaaccgctgccccacgaaggtgcttgatggcaagatactcatggaggctttcctcggcaaggcaccggacatcagcagcctccgtggcttcgggtgcaaggtgcaggtgctcgtgcccaaggaacaccgcaagaaactcgaagcaagacgcggaacggcctctttgtcgggtatgcaactggcggcgcgtatctggtccacgtaccggaaaatggggctggccacacgattactgctagcacggttgtgttgtacgaggaccagttcttgcctgcgacagatgcggacgtggtcacgatcagtacgtaattggcgtaattggcggtgtccatcgctgccagcactgagtgccaactccagctggagactagagaaggaagacgtcatcatgggccctgtcgactttgaagaagagctgaccacgcccgcgtcgcagccgacccgttcagaaccagtgggagtcgcgagacggcaggctcggcttcgagaagacccgcgtcaagagaaggaggtttcccctccgcgtcagtcaaaccgcattcccaagcccagtcaacgtcgcctggagttcgaagaatcgcacctcaccatggaggaagtctgcaacctggtcgaagaacgtgttgctcctgcccagttcgacggcacgaatgtgcgtgacggctttatcaaccgcgaattaacgcctagcgatattgaggtttggacgcttctgtgtggagccaatcaacctcgcggaggtgtagcaagccgatgatcgtagcgcgtgggaggacgccatgctggacgaaatccagagacggcttgagaacgagacgttcgtggaggtcccgctgcctcctggtcgctccgccatcaagtgtaagtgggtcttcaagaagaagatgaacgcggatggaacgctggacaagtataaagcacgtgttgtcaccaagggcttccgtcaacgctatcgtgaagattacacggagacgttcagccttgtcgtgcgtcacatcacggtgcgtcttgtgctggtagtagccgtacagcgtcgcatgcaccgcttacagcttgacagcaagaccggcagccgacgacgcccgtggaggaagcagtgtcatactttcccacggctttcgtgtcgttccgtatattggaagggcttggatgcaaaggaattcacggcggcgacggacgcgaggacggcgacggacaggaaggtaggaaaggagccttgggaaggccggagaatgatgaaaaatgattgaggtggggccaaagctgaaaaccaaacgaactacagtctgctatctgctccatgagctgctgctgctcttacatgtagccacagcgcttgatgcgcgcgtgacgccccacgattggttgccgcgtcgatgacggcttgaaccttgagtgattgcccgagacgatgtctgacttgatgccgccagacgtcgtcgagctcaacgagcaactggctgtccaggccatgcaccgaggtcaaccatgtgtgccttagtcgcgaccggcttcgttcgtcgcttgtttaagctgttccaacacccccactcgacgaacgccaagatcggcgcgaaaacgctcaaacttgatggttccaagtggcttggtgaaatagtcggtgatcatcccagcagtagcgcagtagttggtctgaatctcgccctgagcagccttctcgcgcaacaaatggtacttggtgtggatgtgacgagaacgctgtgtcacggctctgctctccgccagatgctcggcgccttgattgtcttcctgcatgacgatcgtgtcgacagcgatccccaagcccttcagcaccaggttgagcccgatacactcctgcacgccggcgctcatagcgatgtactcagctttggtcgacgacagcgtcactatagattgcttcttcgatccccactcgacgaggcagccgccaaagaagatcgcgtagccagtggcagacttggcgtcccgctccaccgaaaacgctgcatcgcagtacacctccagtccactaccagcaccttttctgaaggtcaacccaaagtcagttgtaccgttcagataaaggaagacaagctccacgccatgcttcgcactgtccgtcgggcgctcgatctcctgcgctaggatgcggactgcggtggcaatgttaggtcggcttatcactgccagatacagcaacgcgccaatcgctggacgcgcgcggaatcccgacggctcctgcacattgaacaactggtcgcgatagcggtcctccatgggtgtgcatgccgtccgtgcacgcagcataccaaatcgctcgagaatcattgtagcgtacgtcgggctgcttcaacccatacagcgcccgcaacaattgccaaacgtggctatcgggagactcaaatccctcgaccggctccaggtaaatctcttcgtccagctccgagtttaagaaggcacagtcggtcacccagcagacgacggtagttcaggtcgccattgatgatcaccagcgtcgcttcacgtgacagacgagtctggagctcaatgggcatctcccagtaataggtgtagcggttccagaagatgccggggcgcaccaccaactgctcgtttttcacataaccggccaggcgcttgcccaaggcctgcgcctccggagtacgcgactcccgctgcatctcggcgacgtgtttgtggacatctgcaggtgtcgcatccgaaacgtacttgggctcagccttctgacctgtcctcttcctcgcgctccagtcctccgccatgcactcctagccgcctgccatccgtccctgcgtcgtgcttaaaaatactgaaccgagatgtttacaaattgtaaattacaatagcccgattttcatacctttctatcgctgtccggaatgaataagtgggcctgattggcacaagtgattttatgtttcgccagtgtgtctctattgcaggtttgacaggtttccggattccggtccggaatctggcaattactgtcgttgcgtatcacattgtctgttggtatttctgctgcttaaaatactcgctcgtactaactacagcgcatttgatcagggaacgagtatcagcagtgcaagcgggttggctagcagggcgcatggatccccgtgtctctactgcttcaggcccgaaggccaaacggtggtccaagaaccctggatcgtcgcatctgctgcgaaatgtcaggactctcagtgcggagcgcctcgctgtggaagccccagaagaggagggtcggccgcaaacatgccccgcgccgacgttaacgcctcacctgcactggaacctgaacaactcagctctcaatatgctgccaaagaaccaagtcgaagagctgtacgggttgttcatgttctacgactcgtccacgattggagacgcgctgccttcgatcaactgtacgcggttcatggagctcctgcgcgacgccggactgctcagcaacaatgatgttatccctagttccagctcggttgtgccaccgacggaaggacttcgggttgagagtgtcgagaggatcttcgcacaggctgtcatgggcaaaatgcgcgtctacttggacgcagacgaccagccagcgctgacgttctcgctcttctgcggcgccatcatgaattgcgcgatgctgctggttccgtcggagcatcccaccgacgcgttacgccagactcttccgaggcttctcgcctgctcgattggcaccgagcatcacgcttcagcggcgaagaaggggttgatcggacacctccccacgggtggcacgctttcgtgttggatacccgagcaatcacatgctccgctccctcagccagaagacggtcaacaagacttccgagacctgccgtctttccaacaagtcatcgccgactgtgagagcgacatggcgctcgaggagctcaggcaggagagagtggcaaagctctaccatatccctgatcgcctgcttgcgagcttcgagcacgacacgatcgcactcatttcggacaagttccgtctgtatgatgtctctgaacgcggagtgctgccacgccacgagatattcgcgctgctctcgggtctgggcaaacgcgtagaccttcctgatccgtactcggtgctcccgaggctctttgcttctaataacccgatgagtggtggaggcaccggcggtggaattagcagcgagagtgagatgacattagcggagctgctcctagccattgaggtgactcgagaggccaagcgacattcctccgcagcacgccttgcctcgatgaagatccgactgacccgagcagctacgaagccagacacagcctctccttcgaaccaaacgcagacgatgacaaccaaagtttactggaactgaacgatgttccagtgcaagacaaaagcgccagcacgaaaggctccaaaggtgccaaagagcgtggaaggagacggggtgtattgaagccacgcaagtcaacgctaagccaagcctccgattcagacggtccgatccgtatgacgaagtcgcgcggctccaaggcgcacctcgttcaccacccgtccactgctaacaggagaaaagccgtcttgccctggaggacgtcgtcgatcaacagcaacaaagctgaagccatgacgtccgtggcagcagagttgattaaccaggaagagccgacatcccggaggcaatccgcgctgttagccacagccagagagaaagagcccacagttgtggaggcggactccttggacactaacattcccaacagtaatgacaccgtgagcgctcttcaccaggtttccgacgcagaccatgagccagagttgctatgcccaccgattatgacgattgaagtgtgtgaacccccaagtgcaagcaacaggaagacgatccgtatcttcttgctgctcggtggtgaccacgatggagccatttgctgcaccatctccctcgtgtttgcgaccaaagaaatcaccgaaagcgaggggatattctacgcgacagcaccaaacgagacgacacgaacgaagcccgtgttgccgactcaaaagactttggccaccgcgctacgtatgctgaagaagtgcgtgataaccagaatggagcgcggtttcgagcagcgtcctgctggccaactcattgtcgtggttaaaatgctgcaagatctgaacgaacgacaaccgcactacagcacccccgttatcaagacgtcgcgggacactgcagtgctacctccaaggcaaccccttgctaccgcttcagtatctcaaaggtccgaagggtgccgccaaatctcctcggctccatcagaccatatccacaggttaccatggcaacaagcgaaagttccaccccattcaaagtctacccgttcacagagcaaactcccgaaaaactataaagacctccttgcaacgtggcaggttgctggaagcgacacgtgggtccacaatgtgaatgcggcatcgcctctccagccggcactgtacacataccaccaagccatgccctctcgtagtggccatctacatctaagccctcttcgattcccgtcgagactaggcagccacatcaaaaacaccgaagagccttgagctcaaccaacccttcgttcgacagtcttcagattgcggcgagtttctctgtcttcgattcattgaactcctaaaggagaccgaccctcatgcttgtctgtaaaaatacctgcctctgtcttccaagaatggccttccttggtacggagagagtggaagtatcgattgcaaactcattcatgaacgcctgacaatcgagagcatggatcctcgagtcgccaccgctcccacttcaggagccaaaaagttcacaaagacaaatgtcggcgggtcgtcgtgtctgctgcgtcagcattccaacaaaactgtcaacaaatatcgtcccgaagccactgcagcaaccgaaactcaccgaccgaacacctgtccggtgcctactttgacgccgcagttccactggaatttgaacaattcagcgctcaagacactgacgcaaaaccaggttaaccagctctacgggttgttcaagttctacgactcctccgcagttggagacgacctgccctcaattaactgcgcccgactcgtcgaaatcctccgcgacgcccgattgataaacgaaagcagcagcagcggtactaacgtttgctccgtgatgccgtcaactaggggcctccaagtcgacagtgtcgagcgcattttcgctcaggcagtcatgggcaagatgcgcgtgtatttggacgcggacggccaacctgcgttcacgttccctctattctgcggcgcgctcatgaactgtgcaatgctgttaactccactgtcacaccctgaggctgcacttcgtcaaattctccccattctccttgagggctcaatcgtaaatgggcatcacgtctccgccgacaaagggatccttgggctctttcctaaagacggcgcgatctcgatgtggacgcctggccagttgcaggatccgcatcaatcgaccgacgactttcgagaatcgacaccattccagcaagtgatagcagactgtacacgcgataaggctctggaggagctgaagcaggagaagctgacgaggtgctatcatattcctgatcgcctgcttgcaagcttccaccgagacacgatcgcgctcgtttccgacaagttccgcacctttgacgtgtttgatcgcggtactttgccgcggcaggaagtcttccccctactttcgagtgtgggcagacgcgcagacctccccgatccatacgcagttctggcaaatctgtctgcgtcaaatggcccttcgtcggagatgagtggtggcggcggtgaattgacactggtacagctgctccaagccattgaagcgacccgagactcgaagctgcattcaatcacagctcgactcggcgcaatgaaggtgaacaaccacccacgcgtggacccagcggctgaagacgaatctgctttggatggacatttgcctcccgccatcaaggaaactgcggacgacgatactgaccatgatcacaccgcaagctccactcaccaccatggcaatgccggtggctccatcagcaaagagcggaaaaagttgggagtgcctcgctcaaagtctcgacggtctatgctatcgcagccaggtccgggaggcagttcgtccagctcctcgagtcactcgctgataggtagtaagcaccgcggcgggtctaagaaccgcctcgctcatcacgcctccacctcaggcaagaagaagatagagctgcgacgaaagtcgtcgacaaaaggccgcattctcggcattgcgactaccgactcggagagccatggatcggtgatgcagtcgatggagtcaggctcgcactcccatcgctcgaacaactccgacagctccgattatcaggagacggcgggctccttcactcctcgtagtgatgacttcagtaccgatcggcgcaacagcaggtacttcgagcacaatggacacgtgagcacagcggcgactcacgtgcatgaaccatcgagcaacagcaagacacttcgcatcttcttgctgctgggcggggaccacgacggcgccatttgctgcacgctttcgttgaagcttgcaacccgcgaaattgtggagagcgaggggacttactactcagccgcaccgagcgaaatcacgcgactgatgcccgtgctgcccacgcaaaacagtctcaccaacgcgctgctgctgctcaagaagtgcgtgtcgatcaaacaggaacgcggctttgagctccgccccgctaatcaactggctgtcgtggatgacatgctgcttaagctcaaaaaccgagagccacgcttcagcatcgctctgaagcccgggcccagagcatcacttgccgccgcgtcaacggtaaatctgagtccagctaatccagcaaacaccacgaaggcggaggaggaggagggaggaatattgacttcgtcctctttggacttgattcctgctttgaagattgaatcccgcccaattttgtcatccccgccacggcagcagaaacctctctctcttcccaagcctgcgtacaagcatcaattcgaacttccgagcaactacagagatatagtcgcatcgtgggaggtctccaaaagcgacgaatatgcatgggtccacgctgtaaacgccgcgtcgccactgaagccggcttcaccgctccgcaccaaaacaaaaccccatcgaagtggccacctcagtccgcttcgacttccgcatagacacgactattagaggaccacagtcgtcgcccagaaacccaacgcaatgcactcttcatggtaactcttcgttctgcgtcacacatagaaaaacggcattccttcaaaaccctcagatcagttacttattagcgtcctcggatggatggataatacgccgcccgctcgtcgccttagacgatttcttcttcacgaaagcgggacattgcactgctccagcttgcagttcatagcgtggtacgcaaagagctcggccgtgatccgtgcgagtcggtaggagcgccatttgtcgctgtgcgatgcccaacacacgctgcgcaggaagcgcttcatgtggggacagaacacatggaattccgcgtccgcgcacttgacgtcgtcgcaactgcacgcgtgaacgagcaacgcgtttgctgactctgggtttccttccagcgcctgagagatctgtgcacaagataacaatcgttagccagcacaaactcgtgaaaacaatagcaaccgcgtaccgggaatgatgccggtccatctgcccctccatccgctgccgctacgtcgccactagtcggcgcctctggctccgtctcgttcgtctgcactgcgccagcattttccactgctgcgcctccagcccgcagctgctccgccatcacccgcacgtccaccgcagcgctagccgcttcggtatccggatacttgacccggcactttggacagtaccacgtgccctcgggcaccttgggcagcggcgggctcagacagaagacgtggtactcggcgtcgcagtcgtcgcagagcacaatgtcgcgctcgcgctccgagctcttgcacaccacaccgtgttcttgtcctcctcttcctcctcctctgcggctgcgtctgcgtccatctccacgtcgttgtctgcagctgcagcgttgttctctattggctcctgctgctgctgttcctgctgcggctgctgcgacgcgtccgactcaaagtcgctgagctcgtccatggggttcacctcgcgcatgtccacctcgctggaggactcgctctggtagctgctcgggtcgatgaactgcgggctttcattgctgccctcggacggcggagcacgtacagtagctgtactgcctgtcctcgttgacaccatgcttgtatcgctcggtgctggacctactcattcagcggcggttgggcaaaatataataggtggttagcaaattaatgtgatttgggccagaaatgtgatttgggtacgcacgttcggatttgactggcggcgcgtaccgggagccgccgcggcccacgcacgaacgcgtcgatgcgctgtaggtccggatcgcgcgccacggccgtctcccagttgtacagtcaaacctgtttaaatgatcctctctatttgagccatgccgtttatttgatgcaggctttgtcgctaccaaatatttcacttagtttttgtatgatctctgtttatatgcatacaaggtatatgagtcacatttttgggtaccaaattaggtctcacctgtttatttgattcactgctcacggccacacactcttcaaagcaccactgctcaacactcaacgcctaccgctcgccatgtctcctcgcacctgtctgacgctagaacaaaagctccaagtgcacctaaagctcaagcagaatcctggcatgaacaaccccatgcccgccgagtggatctacgcaactttcaaggcccgggtcagccgtgccacactcgcccgactgcgcaacctgccttcttcctacttcagccacgtcgacctgagtgcgaccaagcggcgccgagtgaaattccctcagttcgagcgggaactgagggaatttttctttcagaacgaagctaaaacggcgatggcggacgacgtgctcctgatgaaggcgcatgagctggcggagcgcttaggaggaggaggaggaacaggaacccgcagttcaacctgccattgctctgagacactgcatggagctggctgcatttctgctgcaatgcggagagcagactgacagagaacgaagagctttacagacggtgaccgctttggttcgagagactacggtgaaggcaaagcggcagcgaactatgcacgatttctttacgtgcaccacataattgttttaactgagtccattttatatgagtcattgtagtagatggtcactaacagggcctcatataaacaggtttgactgtacagcgttgacgagctggccattttgagcaaaaagcaatactagtggttctcacggttggtagatttgcaggttgcaggtagatctaaccaatcagcgtaaacctgcaggtgtgttcagaaagtgcattgcaggttagccagcatactttgtgacttgctgcaggtttgcaggtaaatcctattggctgatgaaacctgcggacctgagaaccactagtccaaagtcaataatatggtcactcaaattgatcagtacatttattattattgaagataccgtcggcatgttgcgcgtcgcttacgaaggagagcgaggtgccattgtagttctgctcttgttctccccgccatcccccacgcactgtgcgctccaccagccggcaagggcacctacctaactttagatggctccagcttaccttacacaaaaggaggatctacgacaggtgcagtccgtgcaaatttctccgagggcaactcacccctcaatcactgagctacggtatgattgtgcgtccggggacccgagcgaacgaccgaccgctgtcgaagcgttatacaaactgcaagcttagctttagaccagggctttataccattaactgggggaaaatatgcgggctacggcttgcaggtgtacgcccgactacttcgtgctaaggaaatagctttcatgactatccggatacagatagacatcaatgtgtacactacagtactattttctctttttttacctgctttggctacaagcgtcgctcatagctctgtcactgtattcgcgaaagccgaggaagttggatacgcgatcgccgatgacattcgttcacggacgcgctgatgacgatggcggctggtatccataaatctgcatgtcgagaactggatggcacagtatattggtacacttcaccaactctgtgcccgagtgcggtagatatttgctcaaaatagctacgaggtgatcgtggtgaccctggcatgcattgtacttaagagcagacaaggccactttggctacaataggtactctgcgactttaatgagcccgaggtgtgctcaactccacagacggcatagataggtgggtagtaatcaccatttccgtgcatcaggtcgtcgtctgtacgcggcagcaacttgccgaataattccatagtgatgcaacaactcctctccattcccgaaccgacctacaagcactcaaggcgtgaagagcgttctcaatcgggcctgtgatcaccagcatgcgtcagggatgcttctttctgatagccgtcgccttcgctgcatgtatccaggcttttgctatcgccgaacaggccaacgcaattgcaagcctccgaagcagcagttaaacgggtgacggagatggcaccaccaatgctgaggccgaagagagaatgcagacgcaaagtgaactcgttttctaccaaagagtccagtgttgtcaagaagttgaaggagtatccgaccttgaccaagacgctgagcggcaatccatcgcttctcaagcctttcgagaacaaccctcagcttgtcaagacgttcgagagcttgcaaaaggacacggctctaatggcgaggatggagagtttgaaaaagagtccttccatggacaagctcaatacggtgatcagcaagaatccgagcgcgctgacggaggaaagagtggagaagcttggtgcggccgtgctgaagaaacgttctagcagattatcaagcgaagacgaacggggctttttgtacgcgtgcggcacgatgtttttattcacacttggcgcaacgattacactcgcgctaaccgcaggatcaaggttgtagtcaggcttcgagacaaagtcataaacatcagagcgcctgcgtgcccttgatcacctcgcccgtcgtgccgttctcgctgatttaatcgccctcgcgcagcagcacctcggtgccgctcgacttgtggaagcgcatcgtcttggtcttggcgtcgatggacaccgcgcgcgcagccacaaaggcacgcttcgccccagccgcgggccaccacggctgcgtgggacgtcatgccgccgcgagacgtgagggcgctctcggccgcgtgcatgccgcccacttccttgggcgacgtctcctcacgcatcagtatgcacgcgaaccacgcctccgcgagggtcgccgcgaacacgatcttgcccacggttgcgcccggagatgccggcaggcctcggcacagcacgtccttgctccaccacggcctcttcctccgttatcagcttctagcgccaagcggcggagcccgtgtgcttgcagttgcgcgtctgcgtcctgcaccgtgaactccgtgccctccacgttcttgaaatgcacctccagcatgtagacggtctcgtcgtgctgtctctacacggtcgacaacttctgcgccagctccgagatatgtagacaaaagcctgcacgttcacggccgtgcccttgatcctccttgcaacaatggtattataatatccagctcaaacacaaacttgaaacgttgatcttcacatcgatattgctggcgatgttgcacgatgtcaatgctgtcaagcacgcaacttaaagacgctggccgttacgttgcaggatatcaatgtatcaaacttttctgaggccgcccaacgagtatgcctacagaaacggacgagccgcttcgagagttgcgttcaagttggtgtcaatgaacgggaccggtgatttctccccgaagtctgcctcacctagcgcgatccgcgcttcttcgctcaactgctcccacatgacgagatcttggagttcgccagtaccccttgccgtagtcggtcgcagcgtgtgataggaaggctctgggcgacaacgctcgtacgagagcatgggggtcgtcatgttgatatactcggcgaacttcgcgtcgcaactgtaacgatagcactgtggcggttcgttcttcaaaatgtcataccctccttccacgttccaagtcgagatggcgagaattttgggcgtctcgagcgcagggttgtccaaccacactacggcgctgacccatttgtgtcgttggcccttggcaaggatgctgccatagcctttatccttggggaagtaccagccgtacacgatggcccagagatccttgtaccatatagctcgtccatacacttgcgagccgagagcggaccccttgcattccccgtctttaggtcctcttccttttagccccgcgctcgtttcacccgcagcgttgacagcagggtacgggtggcatccgccgacgatctggagactcggtttgaattttacagcggttttctcggacacggtgactggctcgggctgcgcaaacggctgtaccttgtcgtggtcgatagtgacagcccccgcagcgctgaaggaggcgatggcgattgcggagagaagaagagagcgtaggatcatggtgtggcttgcagtgcaggaaggcggtgaatctgaaagtgaacattgcttcccgaaaggcttgcgatcaaaccgagagtcagttgtcccatctttcgcagcatcatgctggggccaacgagggagtaccctctacaccgtagatctaacaaaaacacctaaagtatgcttcagcaccgtagttcctcggatttgcaccacagaacaactatccttaccactttgtataccagctggttgcaaaaaacatgtgtccgggttcacccattacatattgtactgtagaccttaaaacgagtttgtcagcgctctatcagactcttagcactacaggcagaaccttatactttttgagaaagcatgtttcccgaattgtaccagacttagggcgatgtattgttttagtgaacggtggagtcccagatgaaaactatctccttagagcgtgttcgctaggtagctggagatggagatgacctctcatcaactctatttcttgtcttttgattggtcaaaatagtttagttcacaacgtgacaactggagaattaccccgtctccttctccagctcccagagctggagaaggagaaagtagctggagattgaggcagttcagccgcacacacaatgaacgaagaggaagctgtactggttgctacatgctcagctgtcgcacaggttgcagtcctcctatcagaagaatccgacgatgcgccgcaaggccctaaggaacagattcgtaccgtgacctcactgcactttgagcccatgctacagtcagccgcgtatgcaagttggtttgaagtaggcatgggcagatttgaaattctagcttcgtgagagaaaacccgaagtaaacgtcgtagagtcgatattactgcagctaatgtgacctctgggtgctcagtgcattcatcaagttcgtcgggtttaccaagcttctgcctcgtacgtaacaggaagctggacagctgaagaggagttcgccatcaggctatttccagtcgtgaaggagtttctcatgttgccaaatgcgcgagaccatttataggccacctcgtgcaccacataaccgacgccttcagtccctgggccatttgccaacgctgacgatctcactcgcttcggaccccgcttgcggtctaacttccggggactggcccgtcgagacatttgggagttcgttgatgcggctgtagctcgctgatggcatgacgcggaataaggtcctacccacagctcgacaaggcccagacgaggttgcgctacagggaaacgcatccgtcgtcaccggtggcagtccgtcctccgaagtgatccctgtgaagctgaagaaagttccaagcgggcgacaactgcgtcgaatcgaaagctttcgcttagttcggccattcgctgagatctactatcgattgtcgtggaccacgagacacaccctccacgtggtcgtgaacttatacgtcgtcgtgtacattttcctgacggtgccatttcgactcgccttttactacaatccgtactatacagaggacgatcagagtgtacatcgatggtccaaagagctctcggtattcgcggtgatggatggcttcgcggacttgatcgggttgttccagtttttggctttttatcggctgtggaaaaacacgttcgagaaggtgaggagctctgtgaggtcggagaaggtgaagaaaaacccaacggattcgacgtcaaatagcgcccggaatttattcatccggtcttcctctttccgcaagcgccggggtaaaaccaaatggactatcgcaacaatcgagtcgcattcatccatgacggacggagtcgcagagagctttctcgctcagcggaagcgcttcttcgcccgcagcgtcgagttcgtgttcgagatcattgctgttactccggtggagctcataccgttagcgctggggaacttcaacgggctgcacctagttcggattacgaaattgtgtcgcctctacagactacgccgataccttgctcgtatcgcaaaaatttacgcagatcgagcgtgggtccagcatttgacttcttctggagttgatagtcttgctcgtacaattagtgtctgtgctggactttgccactgggtagcctgcgggtacatgctgattggacatgctcagtgtggcattgatctgaccgtgtgcgatgaagttgtggagactagctgggtagttcgcgatcgacttttaggcgcgtcggtggctaggaaatacggcaggacgttgtattgggcttcgcggactctcgtgttacttggatatgacgatgtgacccccgtgtccaatgcggagacgatgtacgcactagttatgacgctagttggcgcactggtcgggtcgtcgttgctggccaactttctcttcctctttcgattccgcaacgctcgatacgcagcgtactcaacgcacgtggacaatgctcgagagtatatgcggctgcagaacatcccaagagaagtaagacatcaggttactgcctactacaactacgcgtggagtacccaccacagtctggacagcgaggaagcgctgcagctcatgcctaagcatctccagtccaaagtagtgtcgaccctgaaggccagccgtatcaagcaggtgtgcttcctcatgaaagagagcgtcgagttcaccaacatgctcgctctcgccctcgcgcgccggatttattcaccagacgaccacatcattgagcctaaagttaacgccgaaatgttcttcgtaatccgcgggaaagttatgatctcagcctttgacggctccaaaccgagcgaatgcagcgagggggatttcttcgctgatgtgtgtctgttgtcccccgagcagtacgaccaaaaggccgttgcgaagacattctgcgaggtctatgttctcgccaaagcaaaatttgacgaagctatcacggaattttatcgcggaagcgaagctgatgtgcgctcgcgaatggccgaaactctcgagaaatactcgatgcaactccataagatgaagaagttgctgggactgcgtggagctcacgagagtgggagtaggaagagctccatgggaggaagttcccacagcttgatggccgaagatgtgcactctcatgaacgacgacgtggtgcgagctggcgccttcctggctcgtcgttttgtatgcactggaacgcagcgcgtctactggcaatcatctacgttgccttcgaggtgccgtattttggcgtatttatcacgatgagcggcgaaaaacccattttcatggcaaaacctgaacacgggcttcgcttcatggttacactgttagtagaggcgttattcggcctcgacctggttctgcggtctcggttctttgcgtatatggatccagacgtgatgtttaacgtgatgcagccgagcatgatcttcgaggcgtacaagaagaaggggttttacctggatttattggcgtgggttcctgtcggtctcgtgcttgactccatgtcgatcgaaccactgcaaggctactcaacgctctttcgcctactgagattattacggattcgctggatcccaagtctccttcaggatctaagcgacttctacggagtaagctccaagctgcaccttgttgtgtctctagtgctgggcgtcacgctgatgctgcatttcgttggctgcatttggtttgagatgacgttcctttctcatgatgaatcaattgcctcgctaagctccatcatgtcgtcggatttcgcccgcgcagagtgtcttcgcgaggccacgcagtttcagaactgttcgtgggtaaaattcgattgctacgcgcatatagggacagttttcccacgagaaaacccagattcaacgtaccaggcatcctttgcgtatttacgctctgtatattgggcaattgtcaccctgacggcagttggctatggtgacattgtagcatattctacggcggagagctacttcgctgcgttgtggattttcgtcggaggtatcatcaattttggggtagttggcgccatgtctagtacaatttcgaacatgctggcgactcaccaccaccacatggagaagctgaatacgctcaacacgatcttggagcgaatggcgatctctgaaaagttgagcagcgatatccggcgattttaccaccaccagtttaccagtcgcaaaaagacgtatgaatccgaattactatcacatttacccgatcgactctgctacgagatatcgtcactcttgcactcggattccgtgaagagtgtggcactgtttgactcggccagctgcgagttcctgcaagaagtaactggaaaattccgccacagaagctaccaaaacggcgagactatctgcttcgaaggacatatttgtcgcgaattcttcgtgttgttgcaaggaagcaagatcaacgtgttttcccgctcacgtaaagtgccagttcgcgctctccatggcggcgatagttacgcggtggccgagtttctgttgagacggccgtattgtgcgactcttactgctgcctctcgtgttcacgcctccgtgatgacgcgagagcagtttgatgttatccagcgcaagttttctgacgacataaatgacatgaaaggtgaggcggaaacgctgtgcactctagaactgaaacgccttcaatgcattgctggaaacctggaaaagctcaaactacagcctcactcgatgcaaactccgagcctcttctaccagcgggatagtgctattattccaaaccgaggccgccctcaaacattccttagcacaagcggtaatttacggcgcgccttcaaggctctgtggacgacgctcatttcgttctggaacgtgtacaacgctgcgtttgtcatcttccgcatctgcttccacgcgcaccttcattttccgagcagaataaatactgcgattttgatagcggacctgagctgtgacgtgtgttttgcagcagatatctatctgcggctttactacttttgcagctcggaacctggaattgagaacctttgggagcggaaagagatcaacaaacattatttccacagtgccgcattcaagtgggatcttgtcgcgtctatgccggtttacaccccgtttgaaagtgggtcgttgactgcgagtctctgccgattaccgagactcattcgctgcggtgctctttgggggtatttggatgacgttatcctgcagatccagcagcactttgcgacgcacaatgtatcagcgtacttgagtcccgccaagttgctgatcattctgggactagtagcccactacgttggctgcatcttcttcttgatctcagagcacgagtgcgttcaggtggagtcttgctggatgcaggatgatcacttgctgcatgagtatcaccattccgtcccgatcctttacgccaagactttctactgggccatcacgaccttgttactggtagggtcacgtgaaagtgttcctcgcgatgcggtggggacaatttggactggtgtcacctgtttaggctgcacatttatcattggtcacattgtgggcgagatctccgagctcattcacgagcttggaaaggaaaccaagcagtacaagagtcgaattaccaactttgggaattttgccaaagttcacgacctcccgacaagtctacgagagcgcgtggggttctattttcacgaacatttcgagcacactaaaggcattgagctcgagaaaactttggatgagctatcagcgaaccttcggctcaaactccggttggagatttacggccgcgcgatcgcaaacctgcctatttgccgctttctcgccccatctcaggttaacaaccttgcgttgcgattaaggccggagtatttcatcccaggggacaacattctggaggaaggaacctttggcaatcgactgtacaccttacgcaaagggctggcagccgcgtattggacgaagtcggtatcgagcatcgcagttctccttgagggctccttcttcggagaagtcgctttcttcctgccaaaccagcgccgacttgcaacggtacgctcaactaccttctgtgaggtgctgtttgtgtcaaaacacgactggcaagagctgtggacgaccaccggtagtgcgtccgacaaccagatccagaagcacgcgctgcacgcaattctcggatgggttaccaaccgactccagcgctaccagcacgcgtgcttacgtattgcaagtcgcgcgaagcggttgcttacatcaagcactggcccaattatcgtcgagactaaaaccgataccgcagcgtcaatagctacgcggaacaaagtcatcaatgggatcgttcgaacgggggcgcctccacgcaagccgtccaaaacagaccttcggcgttttttcacgtctcccgaagcgcaacttctggagaagaagaccgagtaccttttgatgaagacggatgaatatgtcaagacattcggtcccgagatctcaagcatggattaccgcaagtcgtcggtcctcgacatggtgcgcagctcgatatcaatgatctctgtccgcacatcccatcgaacctcttcgcggaaccgagatggtgccacctcaacaaacggtatgtggcacagtgcaaatgcggacacgtcatttctggtgggagaaaacaaaaactcagatatccgcgtccttcaattcatggtggacctgaatccgctcaacaaacacgtacgtgacaacttgggcgacgctgggatacgcgctgttgaggaagagtgctgggcgcgatgcagacagcttgcggaagcgcagcacatcgttagcaaattactcgaactgctgcttccgtcagaatccggcaatgtcacgcgtcgaattcgagtccgaactccctctggaagacggagagtgaggcggtcgtggctagaaaagaaatttccactaagtacagaggttgaagcgcttgatgtggctccggccgctgcatcaaaaccggtggtgggggttgatctcaagagttcaacggaactcacgaacctggcgatgctctcgggggagaaaagtggtgcgcaacggcgacgattatccgtagctgcgtctccagaccagaggcgtgtggttccatcgacgaaaacggagctagtagctgctctcatgcgaatgacgaggtgccactcgctgcccgtgatcgagaccggattctttggcgaacatggtcgtaaattatctcgccctaaagctggaagtggtggcatcgacttcgaaatcatccagcgctgtcaaagaccgcaatacgtcatgcagctcatctggtaccatcgctatcgtgagtggagacaaagcttgcgccccgcagctgtggtgccacaactcaaaagaggtccaaccttaccaatttcaacgctgcccttaccccaaaagcaccgagggaacgctctctcccttaaaggtgacatccaaatccctgggttccgtcgactaggacccccgcgaatcgcagccatgggctcaagcctgcaacttccaagccagcgcacgcttttatctgcaacgacagacctggaatccaagcaattcattcgacgaatcaaggaagcgggaaaagcctgggacctggtcatgctcttcgtgtccatctaccacctcatagtcacgccattcaaactgagtttttctgtcgctctcgtggagctgcctctaaccactctgcgacggtggtcagctttggagatgttcatggatgtcttctgcgtggccggtgtggtctttgaactgcgtcacgcttgcatgatggagcaagcggtcatctcagcggctgcaaactcgtcgaggaatcggcttggtcggattttcgttacgaacccggagctccgagcatacgtcgtggccatgttacccttggagctgctccttatctcggataaaatccgcgtaccattttcccattctcttggattatctatcgatgcgtcatggtgggcctctcgttggatgttacggatgaatcggatgctgcttatccgccggattgaccatttatccgagcaatttctacagttcgtgatccacgacctcaagttttctgtaagcgaggctgttctgtacttcttacgtggtctatcttcatatctagcaacggggcatatcctagcctgcatttggtttggtataagcgaggtgggattccactactacggcacatcttggctgtccacgtccggtatgctcacctacatcgccaagggggatacggtgcttgagcacagggggcggatgctgagtgagagttcgtctaccttttatctagcgagtatctcgctcgcgcgcaagtatcttcggtctcttttgttctcgatggagtgcatttcgacgctattttacggtgacatcctgtccatgaacccgctagagcttatcgcagagattgcgatcacactgtggagtatctacatttacggagcgctcgtcggagcacaagccgaattgttggattcacgtgctcgtaaggaagctgcgttcgagcagagcttgggggaattacagcactatgtggtgcaaaacggagttccaaaggctctaaagcggcagatcaaggcgtactacgctcgactatggcggcgttgccgtggtgagcacgagtttgctgccgtgtcgggtgtatctcgggcattgtatgaggacgttattttaactacacttcgcaatttcgtcgcccaggtccggtcttttcgagcgcttgacgaacacttcctgcgcgcattgcttgtgtgcttacggtacgccgtgtgctcggagaacgaagaggtgttcgtggtcggagatgtggatcgcagcatgtacttcatcgctcacgggcgcattttgatcaagactggctccagcgagtttgctcgcgaacgaggcgaccacttcggtgagttggcgttgctctacggcatctcgcggttggagacggcggtggctctctcggtaagcgagttgtatcgactcgaccacgagccctacgagcgattgctgctcgagttcccggagcaccggactcgtaacaagctggcatggacgacggtagacgacgcggatctggtgggatctccgacctcgcaaaacgcacagacggcacttgcgttgcgaccgagtatcgcgaaagtggcggctacaactccttccaatgtggacgctcgactgcagtactcgttcgtttacagggcgacgatgaagatgctggcgaatatgcagacactacatccgcttgaggccaaggatctcatcctgaaatgccgagaagcggcccgaagacatttgctgcgacgagcgagcaattcagattgtagtaacggagggacggtagggaaagccgccttgccaacggcaagctgcttcccgtcttcgaaaagcgtagagcgctgagagctcagcagaaataggttgaaagtactacagtatcggtgtgagaactaagtactaatagtgacatcagtagtacaacaaaataatacagtattcgaaattagacataacatagtatatcctttctaattactacaatattagtatgagtcgacagagtcagcatcctcgctagtacttcgaagtactaatataatgtggtgtgttatcattattcttttgttggagtactatcatttgtagtttttactggggatagcagtggccgataggccatgccccaaatcgggttaattcgcgcctcggtaactgaagccagtaaactgaggccggtatcgtggtcctttgtcactggctgtctttctactggtgacccggtaactggagccggtaactgagtccgatctcggttttctgtctttctagagatcagggcatgacttcagccattgcgcattctaaagcaaccggcacctacgtacgtacctatccccctgcctttcctttatctcgcgagctagaacgattgctcagtacagccaccaagttccctaaactaacatggtcgcgcgtttttcgccataattcgccactggctgactgttgtagttggcgtcgcaggctgtgtctacctcggtctcgctgatagtcacttgcatggtcatgggacttcagctattgagcaatttcgcattctaccactacaccaagcagccggcctacgtacctagccacccacctctacaacgattgccggagcaccatggccccgcaaaagctaggatctgccgggtaatgcaatctgaaaagtagatactatttagtaagtttggagcggtacgaggacaaaacgagttttaactaagaagtacaaatgcagcagctacaagaccgaaagtgtgaccgcaggagacacttactctatgtatgtggtatagccctcaatcataccaacctttggcattgagcagactattttttagaaatccttaaatttcaaaccttcttcggcacgactacattaatggccccacggccactacagctgggagggtgtatacggcgcgcatcttggcgctagaagtcgtggtctacagttaattttcaggttacaaacaatgcgaaaagaaaacaaaacgcaacgttaactacgatacaatatatttaatgctccaggtttctcataaaggtatcgcccatgaagctgatgttgtaaataggaaaaccttgcaagcattactcagcagtgatatgttaccaatgaggttatatgtgtcattgcgagtgttcattctgtccagcagtaggacaggcaacaagtgtggctaggttagagatctagccccacgtctccaaggggaattcccctatccatgttcgtacggagcctctgctccaagtgtggtctcattctcaaatataccttcctcaaaggactcgagtctccggcgctgtcgactcttctcggtggtcttgcttttctgacctcctttagctgatagttcttcctctcacttgctagggcaagagaggcgacgactagttaagcttggaggttgcttgagtggctttctcagcttcgatacctagcgatcgaccccaagctacactgcctacggtaattagtctgacctagactatttttgattagtttttttttttaccaatattgatggtaactctcgacatacaactacactgcctccggtaatttatctgtgtgcggaaatagtctatgttcgaaaaaggtcttggtcagactatttattgtactggtcaaattgtagaattcataattagtctgaccacttcaacttcaaaattagtctctcctgtgtcatgcgggtaagggtgcaaggctctcatcaccacgactgacccattacacctttttctcctttgcaagttttgttgttgtttgtggttcaaaatccagggaaaaggtttttcctccagcttgctgcagaggcggtgaaagccgtcaaccttcaaagggacaaaaatggcatgtcctatgcgcgcaaggcgatgatccgatgtggaatttcacttggaattgatggtacctggtcggttggccagctctacccgcatcttcaagatattatcgcgaaacatcccgagcatttcgaaggtaagtcggtcgatgaaaactcctctttcgtgtgtgttgcttcataagtagtcttagcaaaaatatagtctaggtcagactatttattgtctaagagcaatgaaccattcagtggtctttccgactgataagtgagcaggattgtttcaggctggtcttcacctgaattacagcctatatcatatggcctggtgtcagtattttagccaatggagcaagttggttaggtgaatgcgttccgacactttccgacaaatatttgtcggaagcctggcctaactatgtatatgtctatactaaagtcaagtacagaaaatattttgcaaacacttttgccgttctgacagctaggatgtgtcctagaataggacgtattagagttttgattggtgttcattacaagattcgcgaccatgtccaagtgtgtcttcgacgcgggcccccacacgcgacgcagcggcggccagagatcgtgaccacaacggcgagcgcggagcgcggttcctgcacacctccgtgcacgcatccaagggaccggcagcaggacgtctcgcgcatccgccgtggatggggcacgcccagcgtgcgcggctgcaggaagctgcccatcgacgcgaagacggtgcgtgtgctcacgatgagcagcgctggggttgtactacaggagggcatcggcaagagtggcgtgtcgggcgagatggtcaagagcgagcaggagctggagaaggctatcctgtaacagggttacacgcacaagtagctacagtcacttgtaactctaacatacacgacgtctgttagaggttcgaaagactttctcgaccttggtgtagacacaccaaaggctacatacatttacgatcaccacgacgggtggtccatagagacttaggattcctattggctgaaagcagcatcttttagccaatgagcgacatgcatagcattggaattgtgccaaccagccgttggcagattcctatcttagaatattacatttagaggaagtcagaaagcataaaacaaaaatagcaattctcattttaaccgaaaacattatttggatcgttaatttagagtaatctatactcggaggtccgagtataattaactctagtttaaactaagctacgtttcctcgtacacgtgcgcacacgtgtaagctaaagtagtgagccaaagtaggcccattacacctggtagcactttgtagtccgtccaacgaccgactacctgagttcgtacgtcaccgtacgaacgcggagctgagaaccttcccatggatacagaggtgcccatggaaagctccactacgcctggaactcacgtagcacgcgctgactgtccccacctgtcggatccagagtgggaggccctccaacgactgtcaacagtcattggtgaggcggctgtagctacgatgctgcgtacgctaacgccgacagagcaatacggtgttgctctgggtttcatcctgagcgagcacacgatgttgctgctactctctcctccgttggcttgtcgaactcgacacagccattgtggctcgacatatcgtcgacccatcgtcgaaggttgcgttcgccatgtcatgtcttggcggacgcgcaagaagttgggcgtatggacgccgactctcggatcctatgtgctttagcacgtacgagagtttcaaggatgagctcaggctagcgtttgagccaccacgaaacgagttccggtcaagggcggaattcctcgacctgcagcagggcaagcatgatgtccatgcttacgctcagagagctcggtacttggtctcgaacatcgtgaccaatccgatcgatgaagacaccaaggtcgtcacattcatgaagggactaagagataggcctgtgaagacctatctcttccatgactacccgagtactctcgaagctgcaattactcttgcaatgcaggaggagtttagcctgcggcaggctaagctgcatgcacatgtgccgaggccacagccacgcccggtagtgaggacgggaggcccagaacccatggtctctcgagcgctgcaactgctggaccccagcagtcgcatggaaacaatgtgcgatgctaccgttgcggtagagtcggtcactttgctcgggagtgcatggcccccttgcaccagcagggtggcaatcgcggcggtgccgggcaccgtcgcaaccaaacaaaaaacgctggacgccagtaggcgcggggcgccctactggtaatgcagttccgcgtgtcgaccttggacacgcgacactgaggactgcagcccccagtgaggttcattctcactgcaagaaccaagatgacaagcctgaccttgtcatcctgaatgtgaactcgatgagagcaagcagctctctccgtacttggtagattctggcgcgtcgaagaactttgttcgactgcgaagtctatcaaggcttgacttcgaggattcaaagatacctcgaagtatgttggaagtacgactggcaacgggtgccgttgtaaagaccgagaagcgcatagtacgcgtgcgcttcacgtatgaagaccaagagtttgtcgatacctttatcgtcctggatctggacgataagtttgacattgcattgggcatgccgtggcttgcacggcatgatccggtcatagattgggagaagcgcactctcgtgcgcttcggtcgcgacagcggaacagtgagcgatggccctgttgccgctacgcacacaccgacaggtgcgcgcgactcgtcactcgagacagcgcctaacgccgctgtcccggagcgccctgggcgcgcgcgagcacgcgcgcaagagcagcaagcgccggcgtcgccgccgacggctcaaggagaaatgtgttgatctcggaggtcgacacccgctcttcagcgaatcaggaagagtctccgacctcaaggggcaccgatgacgcaggcgagtcacacgcctcagccgtggaggctgacgcgaatcggattggatcaattttggccaataatgagagccaaggtgacgaggcgccgtcgactccgggagtcgatggcttgggtgaaattgattcgtcggctcggggagccgacgcaccctacgaaatgggggtctccgccaataacaggcgtcgaggtgaagatggcgtgtcggctccgggagccgacgctgcaagcggtgcggacggttgcaaacgtcccgcaccggaaaaacgtgcatgctgtcgtgccgccgggctgcacgacgaagcgccgggcgaccaagccgggcttgaagtcgctagcccgccggatgaacccgccggcggtactgaagaagaacacccgtccacggtgggcgtggacgaggtcaagaaccaagcggagccgggctccgcaaaacaagaagacggcgcatgcgaaggtcgctgcgcaagtctcggcctggggccgaggcactacaagaaatgtctgccggacaggcggaggctgagaagccggatgtcgagacgctgaacgtcttgacgcgtacctgtaccgggttccggtacatggagatgactctcgctaaccctccgacgcaagcgtcggagttgacttcgcttccagtcatgagctggaagggcttcgcgcgtgacttgcacgatggacgcatcgagcaaatatgcattctctcggacgccgagagaacgaagagcgagaatgaagtactgaggcggttctttatggagaccaccactgagagcgaggagactctcagtgcgaagacgaagaaggagcgctttgaagagcagagctgggactcgctgaagacgagtcccttctacgagattctaggaggacgcggacgtacttccggaagagatccctgcggagcttccgcaggacaagggcatccagcacgagattgatctcgtgccgggcacgaagtactgtgtcacgcggcagtggccactgccgcgagagcaggtcaaggcgatcgaagacttctttgagagtcgtcgcaaagctggacaagtgtggggatcgaaatccccgcacagtgctccgacgttctgtgtcaagaagtcacagggcggctggcgcatcgttcatgcgtagaacaagctgaacgatgcgacgataccggcgcagacaccgataccgcgatatgatgtcatcatcgattcgatggccaggagcactatctacagtgctcttgatctgcgcgatgggttctatcagatcctcatgcgtgagagcgatatccctctcacggctgtgagcacgccgagcagcatgctctgggagtggctagtgatgccgcaaggtctgaagaacgccactgcgaccttcaacaggtgcgtgacgcacttgttgcgctcggtgcgcgacttcgcaccgagctacttcgacgatgtgttcgtccacagccgagctgcggacgggatgagcgacgttgagatgcacaaggtgcatctccggaagctgcttgcgctcatgcgcaagcacaagctctatgcgaacctgaagaagtgcatcttcggggcgagcgaaatacccgtgctcgggtgtctcgttgggaagaacggtgtccgccctgaccctgagaaggtcagagtgatcaatgagtggccgacgccgtcgaacgtcaaggaactgcggcagttccttggcttggccacgtacttggaaagtacgtgaaggactacgcgggcatgatacgcccgctgtcacagctcctgaagaaggacgtcgagtggatttggactgctgatagtcagcagcccttcgatgcagtcaagcagggcttggctgaggcgccgatcttggcggtggccgaccaaggtcgcccgttccacgttgtgtgtgacgcatccgacttcgcaatcggatgtgcgttgatgcagcacgatcacgagggtcgtgatcgtgtcgtctactaccaatcgcgccagctgaagccagctgagcgcaactacccggtacatgacaaggagctccttgccatgaagtacgcactcgcgaagttccgagtgtagctactcggaagcaaaccgttcgtggtctacacagaccacgcgtcgctgcggacggctgtgaagtcgccgcacatctcgcaacgaatggtgagatggctctcattcttcgcagagtataacttccgggttgagtacaaactcggaagactcaatgtggtggccgacgcgctctcgcgtcgacctgactacgccacgactaatgccgacgtcaatgccattgacgccatgcgatcgagcaccccaacgtcgtcactgttggacgacgtgaaggtcgcgtccgcgcacgacgcggacgcgaagctcttgctggcctacggctcagcgccttctgaccaagctcgacagaagctgccgaagcatcttcgtgctcgtgcacaccgttatcgggtgcacgacgggttattactctacagtgcagtcgacgacaacgcggtccgcgttgtcgtgcccaatggccacgacctgcgactcaggatcatgtatgagtatcacgatgcaccgactgcggggcatccgggccgtgagaagacacaccttcttctcacgcgagacttatactgggcccaccagtacaaatgggtgcgcaagtacgtccgtgcttgcgaggtttgtcaacgtgtgaagcctgcgcctttcgcgcaggctcccttgcagtccctaccaactccacgagagtgttggcagtccatgtcttggacttcgtgttcggtcttcccccggacagtcaggggaacacgggcattgtggtctttgttgaccgcttcagcaagatggtacatcttgctgcggtacccgctgaagtgactgcgaagcagactgcacgtgtgttcgtcgacatggtgtttaaacaccatggcatgccgatcgacattgtgtcggatcgagacccgcgcttcactgcggacctttggcaagaagtgtttacacttcttgggagtcaactttcgatgtcgactgcggaccatccgcagacagacgggcagaccgagcgcgtaaaccgcgtgctcgtagacgtgcttaagagctacgctcactcgttccaacactggagcgagtgcctgccgatggcggagttcgccatcaacaactcggtgcatgcctcgaccgggcatacacccttctacgcgaatgccatgaggcacccacacctcccgagtctactcgggatggtggctccttccttaagtgggggaggatctccgactgcaccgcagcagccgcagaatgccgctgacacttgcacagtatcagccgcaacgacacgaagtaaagccaagaaccgcgcgtctgtgcagggcacagacgccgacaagcgcacgaagaacgaccacgaagaccaacgcagaggcagggcctactgctggaagcgagctgaacgagttcagctcggacgcaatcaacttcgtgcagcgcagacaagccgtcattcggtttgtccaagacgctatagcagcttctgttgatcgacagaagctgaacgcagacaacgttggctggggcaacacaaatgaattcaagaagggttcattggttttgatagctactcaaaacctgcctaaatatgctgtttccaactttggggcgagcaagctcgctccgcgcttcatcgggccattcacggtgttggcacggtatggcaacgcctacacgctagatattccatctagcatgtgcctccatccgaccttttacgtcgggcggctgaagccataccggcagcacgagccacctaacccggctggcccgaagtggaagccccagcgggagcgaacttctgctccagcgcgtgaacgcgctgggacaagcgcgcgacgcgaactcccacgttgacagagatgtccgacgcggtctgcaggcctgagcgacttgagccctcaggatcgccacctcctgctttagagcggcgaactcccggctctgatgctgctccacagcagcgacccgctcctcgagcgtcgggccaaggtcaactccaggttgaccatacccggggcgtgttcccacccccgccgcatccgatccgcgacgcccgcggctcaacacgctggattgttgagcgtattgtgaaccatagtatcccgaaatcgaaccggcaaccggttcgttatcgtattcgttgtagcgggtttccgccccaccaagatacatgggagccgcgggacgtcctgctgcaggacgttccggaaatggtgagggcgtacgaagctcaccacgcactgccggcgcgtaggtagtgcgagcgctttagtcgcctgcaacgcccgaagtcttacgatcgcgttcctcacgtgtcaggaacttggcacggagatctttgagactcgctggtacacgaatcgtcgcgtacccgtttaggtcgcggtcgctcaagcgcgccgcacccggaagacacaacgtgcaccgttggccttcgggcacagcgcatggaataccagcgtccacagaggatctgtggagctgctccagccgcccgcgcgtcgagaatgtctccaagcgttcacgggcatgcttaacccgctcgcggtaagcagccggtttcttgttgaagttctcaacaaaagcattccaactttgacaaaatgcctgccaatcaggcactttgctgcgagaagaggttttcttgctggagaagtaccggagctcgtggaagagcccgatgtaataatcgcgcatttgattcgttaacggatcaaagtgctgatcctccgccacagcatcgtcgtggatgccgctgcatacgtacagcgggatttcatttggaggcacggtgttgcccacacggtctgcgatgtctgacgcagacggcatccacggatcgcgcgctgctcaggcagcgcgcggagagcttgaagacaccacttcacgcggggagcttaaagccccagcagcagagagcggagtgtcgctctcgccgcgtgaacgcttcgaactcgaagcgtccgagtcgtctccttcacgagggcgtctcgacccggcatgcgggtcgagactatcgctgtcgatagactccttgcgcatgcttgaagtcttccatctccatgtcgccgtccccgtagtcaatggggtcgttgactacagaggggaaccttcgaggacaatctccggttgggttgtccccgccgcagccttggcagcaagagcgtcacgttttgctttgtgacgctcgcggtactcggggatagagcgagtctctatcccggcggaagtccagcgccggcctcggcgacagcaagctggcggaagaagacgacgtcgtcgtggccgacacggaggacatggccgagaagtcgtcgagcgacgcgggctccgagcccaaggcggtgtcgccacccaagcatctgacgctggcacaaggtcgtgagcgtgcccaagcgtcgaaggcggctgccgctgcgaagaccgaagaggccagggcgaagaagcgtcccgtttccaggtcgcctcgcggttccagctccaagctgttcagcgactcggagtctgaggacgaggagggtgccgtccatgaacccaaggagctctccaacgacctgacgagcagtaggagcagtaccacgttgcgcgttcgggggcacacgccaggcagtcggctgccgtgactgctgtcgagtcttcgtcaggcggtagtgccacgtatccgcagggctacttcccgcccgagcctggcactggtgcgccgcacccggctcctcgtggccttaactgcgggtacacctcgaagggttcctatgagcgtgctctcgttgagaaggagccactctttcttggcgacatagaagccgcccggtgtgtgctactagcaccacacaagctcacactgaaggagttcaccacgcttcgcaagaagccggaggacaagggtggactccatcctgtgtggggttaccactgggtcaagccgaatgagaacatgacctggaacgaggtggaagaccgcttcaggtgctacgtccagcgcaaagggtattccgaccaagagttcaaagaactccgtgaggatcgcactctgtccgctatcgtggacttgcacgagctccgcatcgagttcgctcaactcgtgagcaagcgcaagctccactcgaagatggacgagctgaagcaagaggcgagagccaaagctcgtgaagagcgtgggcatggtgcgactacgtctgctaccgtgccccgggtaccggccaagaagccaaggactacttacgaagctgccgctgcttctcgtcccatatcgtaacagcgttcgggcagtctgcctggagctgctcaacgggctcccacgagttatccaactcagggtgacccctccacttcacgagcagctggcgcatgccatggagccgccgctcctggacgactcgttccacgtggtagtggctgcccattacgatcaaggagggccggcggtggcctcgcacggccatggctacgaggctgaggcgacgcagccgtatgctggggccccgagtcaggtggtggccctgcagcaagaggagattcgtcttctccgggaccgtgtgtacgtcctcgagatcgcgcttggcgtcggccttggtggcgaggctgccgctcgtgctggtcagcctggtgccgtggagcggctccgtgaggatgttgcctcgctctatcaagaaactcgcagtctccatggccgtgtggatcgtcgagccgacctgtcgtcttacgactcgctgcaaaaccagctcgctggccttcgggccgagcttcatggccacgcgccgtatctggagcagcagcagccccactcgtatcaggcccagtttggccagggctcgtacgggccccctgcgtatgctgctccgatgtacgccgcgccgtcttacgaccagcgcgcgtatcaggcgccttaccgcgacccgacgccgcgcttcgaggagctgcgctcttctccaccgggccacccaccgcttcctgcgtgcaggcagagccagagggtcatggtacctcttaagacgacccacgtaaaacgtcgggtgagtcgtcatcgacttgggcaagtctatggtgtacgccgcgccatgccggctgaggaccgtgaagggtccaatgaagcggtgcttcagcttgttgctctcgaccaagctaacagtgtttagcggttgatttctagtatctaggagaactaaatccccaaccttaaacacgttcatgtttcctcttccatttcggtcagagtactccttctgtttatcttgggtttgcgccatggtgtctcgcaccctgctgagtatgttcagcctgtcttcggcaaacgaggacagttgcttccgcaaggcggctggactcacgtccgatacttgggaggaaaaggttttccgagcctctcccccacttaggaccgaagtcccggtactgcctcgtaatgtgagcggcacctgagggtggcgcaacccgttcaggtaaaaggacgtaaagcccgtcgatgcatgtaccgcattgttgagtgcgaactcaaccatgagcaagcgatcagcccaagagcggggcatctccgcgcagatatgtccttgagcacgcgattgacgcgctccgtctggccatccgtctgcgggtggtccgccgtcgacatcgacagtcgggtgccgagaaggcgaaacagcgtctgccagaacgtagcggtgaatcgcgggtctcgatcagagacaatggtctcgggcagaccgtggtgtcggaagacacagtccatgaacaggcgagcgacctcgtcgccagtgacggtgtcacgaactggagcaaagtgggccatcttgctcagacggcacacgaaggcaacagcaccagtgttgccacggtcttcgaagtccgaagacaaagtcgagactcatcgacttccagcagtccgctgggaccggtaggctctgcaatggtgccgaggcgtgaccggcaggcttcacgcgctggcacgtctcgcacgtacggacgtaggtggcgacccatgacgccaccaaaacatctgcgagacagacgcgtatgtcttctcacggccgagatggccactggatggagcgtcgtgcgcctccatcaggatgtcgtacttgagatcctcgtcgttgggcacgacaatacggggaggatcctcgggctcgaccctatagtggagcaaaccgtcagcccactcataacggtgcagccttgcacgttgtcggggcgtgagccactcggccttggcttccgagccagcagccaagaaccgcacaagaggtccatgactggcatcgtctcggtaccccagcctgatgcgatcatacagatccgtcgtgacccgactaatatgagcaagctcgtagtcgggtcggcgcgacagcgcgtcggcaagcacgttcaacttgcccggcttgtactcgacacggaagttgtattccgagaagaatgacatccaacgcgccatccgctgtgagagatgcggcgtgttgacggcagtccacaaggacgcgtggtctgtataaacgacaaagggcgtcgagcccaggaggtgcactcggaacttgacaagagcgtacttcatggcaagtagcttcttgtcgtggactggatagttccgttcggctgccttgagctgcctggactggaacaagatgacccgttcgcggccttcatcgtcggcctgcaatagcgcacagccaattgcgtagtcagacgcatcacagactacgctgacaggcttcgtctcgtccgacaatgccaggactggcgcgcgttgtaagctcgctttgatgtcgtcaaaagcatcttgatggcgacaccccagcgccagtcgacattcttcttcaggaaatccgacaggggccgtgtcagctcggtgtagcctgcactatacttgtgcaagttggcgaaacccaagcactgtcgtaggtccttctgcgaccgagatggcggccaagccgcgatggttttcaccttctccgggtccgcccggaccccggcgctgctgacgaagcagcccagcaccttgatctcctcagctgcgaacacacacttgtcgatgttggcgtacagcttgttcgcccgcatgacttcgaacacacgtcgaaggtgccggagatgcacctccatggccgtatggcctgcctcggcacggctgtggacgaagatgtcgtcaaagtacgtctgtgtgaacgcacgcaaaagtcggaacagttgtgtgaccaagcgattgaactttgccggggcgttagaaagcccctgaggcatgaccagccactcccagagcataccgctcggcgtgctcacagccgtgagtgggatgtcgctctcgcgcatcaggatctggtagtatccgtccaccaggtccagcgcactatacagcgtgcagccggccatgttgttgagcaacacgtccttgcgcgggatcggtgtctgagcaggcactgtcgcgctgttcagcttgttataagcatgaaccaggcgccactttccgttcggtttgcgaacacagaaggtaggggtcgagtgcggggacttcgactcccgcaccatgcctgccttcgccttggcggcaaagaaggcatcaatgacttcacactactcccggggaagaggccatagcctcgtgacacagtacttcgtgctcggcacgagatcgatctcgtgcctgattcccctgtccggagggagattggacggcggatccttggaaaccacgtcctcgaactccttcaccaaggggtacaccgggtcccgggggttcttaagaatctcagagcccatgcgcgacgcgcgctgtctctggaactcctccaggacggcctggtccatgaccgaggacgagttcaactcggccgacgtggactccggtcggaggagaaccaactctgcgatctccccggcctttagctcggccaagaagtcctccatggcgagctcctcaaggttcagcaactcggaaacctcgggcagagctgtaagctcgacagctcctgtcttgacccgacgaccggtcacgccgtcgaagatgtgataacactcttcggcggctggagcctttgctggaggctcggagtcgctggcgactggcgtcatcggccacacgactaggcccggcttacgacgtgtcttcgtctcgtggcaccgcctcgacggcaccaccgatcttctcgatcttgtgcggaattacgttacccgccttgttcttgagcggaacttggttacccacaccaggagcgcttccagcgactcccgcatcagttatggtctgagtgacctcctgtggaactatgttacccacatcggaagcgcctgcggtgccttcctcatcagttacggtctgagtgacctcgcgtggaacttggttacccacgccagcgccagcggcgcttctccagcagcccttgctgcctgcggtacttcgttacccgcgtgtggacctacgttacccacctggtaggtgctgtccggcacctccactctcaggccttgtccggcccggtcggagtcgtcgtcagtctcgacgaaccccaagaactcattagacgctgctgcgccctggcggccctcgcgggcgccccagctgctgctagaggtgggaacatgactcaccaaagctctgtcagagcgtgggggacggctggccccgatggtcttgccgcgccagtcgatccaaggctcatgtttctccagccacggcatgccaagcatcaagtcgtacttgtccatgcctacggccaagaccggctccgtgctgtcaaagtcctcgaacttgacagtggacccgaggtacttctaccaccgtaccatcggccagtcttaccgagaccagccgttgcctttgcttccacgtagcgcatcggcgtacttgtcgcgattgcgtgcgacagtctggcggcgcgcaaagttcttggacgccccagagtcgatcaagattctcaagggatgatcgtatctcggtacactcgcgtgcaccacaagcagcccaccgctgcccttctccgcttcgagagtacagagactctcaggggctaagtccccatggcgtgcgcgacccgcacgccctcatgaagacttagtgtttccccagtagggcgccccgcccctactggtgtatggcgttcccctggttcctagggcgcggcttctgccagcgacccctagagccaaagggcttcgaagagaacttcttcagtcctcccgcgggacaagcacgtttcatgtgcccaagcttaccacagctgtagcagcgaatgtcgctctgctcggccatgcccagatccatgggaaccggcccgttgatcgctccattgccggagttaccattaggcgcaccaccagaggcagggttgctctgccataccgtggcgggggtacgagcctgcttgtggctgtactcctcctggagggcgatctgaatcgcctcctccatagtgtttgcttgcacacggaacagttgcgtgcgggcaggaccgacacgcagaccgtccatgaacacggtcaccttgatgtgttcaggcagggggttccccaccaaagaggccgtgagcactcgcatctcctggatgtactcatgcagctcgcgccttccttgtttgcaggcgaggaagcgcgaacgctggcggtattcgtagttcgccggaagaaacgcggcccgcagctgctcgcacagctgggaccatgatgcgaagcatccagctgtcgtcgcttcgcgcgtatacgcccaactcttagcgcaaccactaaggttggagagcgcaaaggcgacacggagtcgctcgtccgagacgagaggcgcgtccatcgcgagctcaacctctcgaacccagaagtgaaggttttctccttccttcccttcgaaggggtgaaccttcagccacaggggcttcggttgcaccggcttcggcgcggccgcagtggcctgcagcccttgaacgtgggcgatgagccctcgctcgtaggtgtcgaacgcgttgatacgctcaacctgctcagccggcgtcgccgccgctaagctacgcagggcatctgtcccaaagatgcctgccatcttacgaacggactcgtactgcgagtcgttcagatggggaaactccgtacgatccatcatggctcactcgatgagaccacagaggattcaggtagtccaatctacccgcgtaggcgtaggattcactacaagtgctaccaagtgtgacggggcacacagcacttcttaacagtggaagcaggagtatacaaactccaagtgaacagccgttcacgtgtccctggtctgaaggagacgacttgacttgaaaagcggtagatctaagactgaatgtagttataggttggtacagatttggcctgcatacaaatcctaagttccctatagtttgtgtcatacaaaatgtatctgttggctctgaggccacctgggtcactatccaggggagtgaccgatgtagtcatccctgaatagtgacagagtcactattccatgtaaccccgttacagatgctgcccttctaattgtttcggtacggcaccgaacagttaaccctacaagccctgaaccgaaaaatatatgcaatgcatgtaacagccatttcgaatgtacagaatgcaataaatccatcagaaatgcaatgtagctgtcgagaatgcaatgcatccccactgaatggaaagtagccggtgagagaatgaaaaaaaaaaattcgagaacggagcagcactctgacgaactctgtcatacgatgacggaggagagttttctcagcgccgtaatttgcccagcactgggaaggagcgacacccggatggttggcattcttctccagcgtgggtcgccgtaccagcttcgaagcgcgttaaggaaggcagcgaaaacgaccggaaaccgcgacagtgtgaagctgcttctagacacttgtgcaacaagaaattcaaacggtttggcttttccgttcactgtcggtatggctgctggcaacgcgatttcttgcggcgatgttgacctagcaaaaatgctgctcaacgaatgtgatggatctggagcgggtaaagctctgaaaattgcagtggcgaccaaccacatcaagttagttgaattgtgtgctgacaaaagtgcccaattataacgggggcactggtccaagcagctcaatacaagcagtgggtgttttgatgaagtacatcgacgccagctcaatcttaggcgcgctagagcagcttccttctgatgtgactgtcgctgcactcaagccgattttgaccaagtgcgatccgaatttgtttccagatattttcacgagtgctgcagcacgaggatgtcgtggtttggtcgagtatttgcagaatgaaatggatacgatgtctattcgctgtgcgctagaagcggcggcaaggaatggccaggtgaaggtcgttgccttgcttcgtgggctcggtgatgcaataggcatcggcagtgccttggtggttgcgagagaagttggctgtagcgaggttgtgctgctgctgaccggcaagaagcctcgattggtgtgatggatcaaactacagtagtgatcatatggacattaatcgagtgaattgctgcacaacatgctgggttatgtctccctttggtatgcatgaacggcgaaaaatatgcaatactagtagtactacatgtgcagtagtggaacactcattgtaacactactagagttacaactcgtagtggctttatcaaattgatcgcagcttcgagtttctcgtgaagacattgcaatgcatgctatttgatcgttttcactcgaattgcacaaataaatgggaaaaatgaatagtttgctcgaatatttgacgtgctggtaagagctcccccactgcaccatcggctctatcgtgtcatcatacaatttgaatgtcttcatcaccttcgcgcttagcagcctccaccccgtggctgctgccgcggatagatctcactgtgagctttttgattatcagtgtgttgaccgagtaccgagaacccggctcgcctgaaacctccggtgcaaagtgaacgtgtctgtggagcagctcaggtgggaaggttcgttcgtcgagcattacgcgtgcaatgacgtgaggcgtcgagatgtcgttcagatgattcagttttgacccgaatcgtggcagcaaaacgacggtagtgagtcccgcggcgagcacgacgcacccggccaccgtgagccaagcgttcagctccggaactgagatccacactgcaagcggctgcacattggcactgaatgtcagcgtggtccttccctgcccacgtggtattgtatcgatcgtgacgccatcttgcaacaggaagaagagcgcggatgtgtacgtggcctgcagcgtgtgctccatgtagtagtggttgttgatcacaagttgtacccggtcctcctgaagcccacaggcctgctcactccagtttgtcgagtcgggatgccatcgacccagccccacattgtgcgggagaagcatgtcgccagctatgacggagtaccaatcaccgccctgatgcggtggctcgtccacttgaatgagagtgagcgctcgctgtcgttcgtcgtgcagcttcccattgtagttcggagccgtgagtagattcacaggcagcgcgttaactccagcaaccaagcgctgttctggttgcgcatctgacgcgctcaagtcgacactcagcccgttgcagtcgcctccatcaaccagacacgcagcgtcgaactcgttggccaagtcgctgacgttccagtgtagtcgactcacagtaaacgagtaaagcttgcggagattcgtcgcagtcgagtcgatcatataatccgcgagactatcatccgtgatgtttgagactagttcatcggcaaccaagcgcttggcgacactgacgagcaacatcgacgtattcgaaatgttactacacggctggaaattgtactcgatcatggaactctcgttgaaacgaatcgtcgactgaatcgtctcagagccgtcggagttcacacagactgcgagcgcgttgacctgtacgggcgcgtcgtatagcagattgtagagcacagtcgatcgcggtggtagaacggtttcggggaatagacatcgtttcgaccacggcccgcagttaaaattcgaattaagccacgagcgacggatccacatccacttcgaacgtcagggcgtcgaacgtgatgttaggagccaagtcaacgtgtgcgaactccgcactgatatcattcgggctgaagtcgctggtatcgaacttgcttgacagaacgggctcgatagcctccagtagccacttcttcttggtcgattcgcttgctgctgggtcggctgggaggagcgttagcagttcagcagttggaacttggcgttgggattgagaagcacttgtagggtagacgtcggcgacgtcagtaggcacttcatcgttccatacagcattcttcccccatggaatgaactcgctggacaggaacatggcattcacgaccaaatcagcagccaacgacgcgtccatcgggaggtcttcacttcttacctcagcattggcaccagcattggtcgcgttgagggtgaaacgaagggtagacgcttcgagcgcttcaggtagcagccgcgtcatcctctcccgctgcgggaagccgacctgaagtacgtcgtttgggaggaagatctggaagttctgcgtcgtgaggctccagtcgcagacaggaggcgactggatcgcagcacgcggctgcaccagagtcctcagaatcgtgttggcgatgggtttgtgcgcagttgactcagcgaccgagtgcgtcacgtttgagctgtcgttgctggttgtatcgtcgacgacggaagacaggtcgctgctggagattgccgcctggactggtaattcgtgtagctggatgttgagcgcgttgaagctgttgccgatcaagtagccgataacggcgctggccaatcctgcagccgaacgcgcctttcagctcgcatgaaagccgcagtgaacgcgtacaacgccgtgatctgcgcagccagtccgatgaatatctctgagaacttgctcagtaccgaggccacattacccgagtacgagttgtaattgtcgaggagttgggtctgttgcttggcgttcttgtcgctggcgttgaaccggccgagctccaatccgaggaggaacagtagcgtcaacccgacgatggagacgatgaccgtgaaagtgacgagcgccaggcggagtcaggtgactcctggaggatgacgaccgacgaggactcggccttgagtacgcggcgcttgactgaggtgggggacgccatagcctcaagaatgttttcaagcttcaaagatcgcggcgcttggtcactggtcgcctgaaaaatggcttcggagtgggaagggtggcttccgtcccaggatctggttgtctcggatcctcagaatccgtcctcctctcagctcgcgcttcgtctattgcggggacttttcttcgcgatggtgactttcgtcaagaaagcttattgccccgagcctgagactgcaacgctctacgcgttccacattggaatgtctttcgtgggtctcatcaccatgtcatacgtcattggtgaactcgcgagtcttttcatttcctatatcggactgcaagtggggttccgcaagaattacatcgccgtggagctttacatggcacgccttcgtctcagtgatcgtctgaagactcggacgtacgcgtttatgacgtctctctggtcgtcgcatgctggtgtgaactacgaagaacttctggcggaaatgcctaaagctatccgtacgtcgtgcgtgcttcaagtgtccacaaagctcctttcgtggttcatcatgaaggtcatcgcccctgtttgctgggacgaaagccagaggatggacgagttcacgcgcgctcttgctgaacgcttgcgcttcgagtgctacccacgcgatgagagtgttgtcacggaaggaagtatcgtgcgagccatgtatttcgtgatcaaaggccacttgagcatgcacagccgctctctcctggatcgaccggtttggcagctacttcggagagcgtcgtttgctggggtgcaccatcagcgcttatactgtacggaccgtacgggcctgtgatctgctttctctgagctccgaggcgtttgttcaagtgctgcaggggcacctattcactcgtctcgctctcaatttgtgtgagcgtgcgtacaaacacgtaaagaagcaacacattgcgtcttgctcgagaactgacatggaagagcggacaaggagagcgatgagcttcctgccaacatcgatttgatgttcaaagctcgaccgtccgtgaagaagatgagtacaggctggtactttttcatcggattccgggagagcacggcgttcgcttgtttcaagcccttctcatagtacgtcccaccaccacggaagttcacgcatcgcgttgcagcctgctcaatcttgattttttcatactcgagagtgcccttatccccaaaggtaattaccgagacgatatcttgacgacagccgcacgacatccgaccttgcaaatagtcccggactcctctcaccaacgcttgccacggaccgcctttcatcgaccccgagcagtccaagacgaaaacgtggtgcaatatacgagcggaggcggcatgcgagcacgtaaaacgatggccgttgatgtacgtcacaccatctcgctccaggaagggaacggatgcagcaggtagatgccagacagggagatcacagccggaaggttctttctcacgccctttgtggtccggtgcattgcataagtacggacacttagtgaacagcgcgcgctctgcaggggacgaacaagggtcttcccacccgatcgttctccagtactcagcatgcaacacttcatcaacctcgtggtctggggctggaatcaacgcagtttcgcagtggcgtcggtgatcccccaaagccgagtagacacacgcatcagcactctggtagcacttgaggtagtggacgtgtcctcgtccggctgtagagcagtacaaactgtacatttcggcgctacccttctcgcctgcggtgtacttgcggtcgtcccagctgatggtgctctgcttagcaacaaagtgcatcttgcgcatgttgccgtgtgcagcagagtgcagtccgtggtgtccgaacggtttggcgcagtaatactcacaggccacgcatctcgcgtcgcatccatgaggggctaccctcccaccccacaacttcttggcacacgagtgcataccgccgtggcttgtttgtccaggctccaatacgatggcgcactggttgcgtgttccaaccatccgcttcgatccatactcgaaattgtcgaacgaaccgctgaactgacgcgtggagactcggacgcttttgctgcatatgccattcgcctcacaaactttactgcatacgtggcttgaagcacacatatgccgcgcattttcactgctgcccgagtaatacccaagcaagcgtccttgttcttgggcaagtgttgcacttaatccaggatttccatgaaaatggtttgcggaatcgcaacgctcctcacagctttccatctcgcacgcataggcgcactgcgtctccacacacttgtgcacagtctccgttcaacacgcacaccccttcacaatttggcgcactgcacaaaataccgcaaatgtgctgcttgacggagcagcgatgatttccgtcatgccccgccatctgcacgcaaacaatttcgcagttcgaagcatccgcgagactgcatacaaacccgcaagtgtggtctccctttccgcagtcgcacgttccttcgtggccagccttaccggtacagtgaggaacctgtccacggtgctggtagctctgcacacagtactcacaatagctgcgacacacatgagtcatgccacagttgtgcttctcctcacctggggagtggcaagctgggcgcgtacactggagttggcactgcgcgcacccatgaccacacctcttaaaacgcgtctcgaacgggagaagtcgagctcgctcgatgttatcccaatcatccgcaaatcgctcaggtcccaggaattccttcacccagacaacagccttcgatttacgacagcaaaccaaaaaagacagcatggcgtcgaaattggtgtagtctgccgtggtgattttttcttctgctcccttcaatatcagctccaaatagtgttgaaacagcatcgtgatggcatcgtagatagaccctgtgtccgctgtttcagcgcagactgatggtccaaaatctaaattctcgtcaatcgctgctagtgagaactggaggttcaaacgcttccaagattcagcaaaatcggggtagtcatggcatagatcttcgaaagaaagcattccagcagcacgctcgttctttgaatccggcagaattcctgtgcgaatgataccaggcagatttcggtgaagctccttcatctgaagttgttgcgcggtttcttcaacagtggtccaatccaggatcgagattttggccaataccagtcggataaagtcgtggaaggctcttccgcttcgaaacccatgctccgattcgccctgctgcgtaataactttcttgaccaacttcttcgcgtgaagtagtgactcgtagtagccaggagtccctaacggaggggagcaattaatactcactttacccgaatacatgttcgttaggaagttttgccccgacgtggctttgagcaggttcctgattttccccgtaaactccgagaggacatctcggccatcattcgggttaatgtccttcacactcatgtagaatattcctcggaacagtcgcttgtcttgcttgagtagatccattcccttttgaaacttggtgaaaagcttgtcaatttctttgtcaagccgcatttccatccggaatatcgtgaacatcgacagcgacgcattcagcaccgcaagaaaaacatcttcttgatctgttcactcgaaggaccccagaccttcgaaatccagaacgacaagcaaaccatctttcatgatgcgcagtgtcatccacgcaccgtcagtgcaacgatttccagcgatggcaaacgaggaccccgttaagtgattgaggaagtagcttttcccggtcgactgctttcccatggacgtgatgacgacgacgcgaccttcccacgccgacaaaagtggcgacaaaagcccaaatcgagttgattcagcaatatccgctgactcctgctccacttcggctacatcgaaagatgggtccaatccatctcgtagcactgtcagcgcgtttgcctcagcgcgacagatttgaataggaagaaaagtaacgagcgtctggaggaatgccaccatggatttttcactcatattcagacccagtaaaggggtacaccgcatgccaagccctctcgaaagatccagccctcgcaacggtttgttgacagccatcaagtcgctcatcaacagtgacagaaaatcgtgacaatcttctagagcaccattgacgtcgtcacaggactggcaacacacaagaacagaaagaggtggcggggatccatcttccagcagcccaatcactgggaacttctcgaaaacgtgataaaacgtgtacagccagtgctccttgcgcagacacttctcgccgctagcatcctttccagaagccttggtgtcgtcatcgtcatcgaactgccgcatgctgtaggaatcgctacggacagtcacgtcaacggaaaatgcgtgcagctttcttgctaatggatcgaaaacaaaaacatgtccgttcacacactctgcttgcacttcgttcgtcagaaaagtgtctcctagtggcgcaacaggtagctggcgataggcatcaagagcaacgcacgacagttttccctcaaaagatccatccgcgcacgctgtgaccaaaacagccccgatagcaagatcatccgagaaccccataagacggctgcgcgaagtatcagtatcactgggtactgctccggtaatcgaagtctggtcacaattgatgtcgacaccttgtaggctgccacttgagtctgttacgtaaactgttttgcccaggaggagcatatcgttgaatggagccgtcaacgtcgagtgcacacccaaatcaacaactttcacgtagtccattcgcttgaatgtctcgtcgaatttgtagatcccgactgaatctgccgacaggaagaccatgcttcgactctgataattgaagtcgcaaagcgagggcaccttcccaaacgtggagatgaccatttcactcgcgcgtgaagaaggcccatcggcattagctggaaagtgcaccaagttgacgtacgttcgttcatttcccgtgcttatttgtatgaccgaccggttcttgatcgtgaacatcgcaatgtgagtctcgtacgcattaagcacatgatggcccaagcgctctgtctgtagacaatcgtccaccacgccacggttcagttgtactttcatgacatcgtggaactgggtggctgaagctttaatttacctcgttccgctgcacaatatatacccctcacgagcttttgcgcttactttcaacagcaatccacttttttccaggagcttttcacggagaccatcgaattgctgtcgtacgatctctttggtgctactgtcaaaatcagacgcactttgcttctgctcgcggttcaaagcttcaagaccggccaactgcaccgcttccagtccattctcgacggcagtccaccacttcacctgcagctcgaccaatacctccgccgttttcgccaggaatgacgtccacaggtgcgagtcgctagcaccccagctggtggggctacaacttgacctcttctgcttctcaatggcaagcaaaaggttcgctttgggggaggttgcgcataaactcaacaatttggcgaggtcggcgtcttggttttgcgtgtgcaattcgagcagtgttgcctcaatatcttgcagacggttggggatttcgagcgccaatttggacttgcgatcaagcttccagatgccgtttgctttgacccacgaacaaaaagttgcatatttgtcagctgcagcttcatagcgcgacaatgctgctggtgagttggccttacagagctgcaaaagtagctcgcgtgagctatccacaattgtgcgttgctctgcaatatcacgtcttaagccccgacgagatcgttctctttcctccatctgcttcttttcgtgcaaggcacggcaacttgacacttgctcctccggccacaaatcaaattcacgaagaatgctttcacagagcttgggtgaacggccaatagtcccactcaaatcgatccggtagacctccgactccgtcttcagccatgctgcaaacgacaactttgcgtttgcttgaaatgtttcttgaaatggttcggcgcgaatcgcacaatccatcgttttcgtcaatacgagagcaggataactgcctttcactaagcgtagttccccatagcaccatccaagtcggcagaagtgtgggacacgcactccgtgccgtcatgttcatcctcctgcttctcgatagtgaaagacaccgaatacagtgacagcttgtcgtcgtgctgctcttcggattcaaccactgcggctttcagcagctctaaatcctccttggacacgcagcaaacaatctctggacttagaacggttagaaaccgcaacacaaacgcgggtgtgtctcgaagcatgtgaggcttgaacaactcgtcgcgaatccacgagaagagaaccaaatcagcaccagagtcgtccttctcggtgttcttctctccgtcggctgcaaccttcacacagtaaaccccttccacagaacctgagagccacgccgctgtctcatttgagcacaacgcctgcatgtcgaccaaagcggccgaaacatccttctgcttgccgaacagcgccgtgactctcactttatcgaggcacgtgcgctcgagcagctcatagcgcaagagatctgcaaactctttgtcaaactcgctggcgtgcagcacgtcgaaatcaaactccatggggttcacggtcggcatcatgccgaagctgcagcacagacgcaacacctccagctcgtccagcacgggcttcaccacttccagctcgcactgcgtctcgcggaccagcctcagcagccggaagaggcgcccccgacaagggccttcctcgcccatgaacttctttctctcctcgttccagttgagaaatggtcgggtgtcaacgaggagtcaaaacctgtcagcgcgtttcgggtatcgtgcggatcacggcagttgaaaaaaacaacaactagggctccgcgaaggctgggataggaggtttttgggataaactcctttattactttttttttacgatcccagtcatctcctgcgcccggtcattcaccttaacggcgaagatgcaagatacgactaggcagtaattatacacagtaatgaaacgaaccttgctcgagatctagctcgtggacatatgaaaatgcttgcatttgtatgctactacattcctgtagtagtccgttcgattcaatcattcactttacatcactccatccgattcggtatatgctactgacccataccggttcaaactgcccacgcatataaaccttttggacccccagtgcggcaccggggtcgtactggtgtgatgggcatcctaccggttcaacctgcccacgcatataaaccttttggaggcccagtgcggcaccggggtcataccggtttctgaagttggggtcaagagaggtcatattttgacttgacgtaccacggatataatcctttttggtctgcgatagcagcactaacgttgcttcctatcccagcaaaaaaccggcatgatggcgatgatcgtcactaggttaaggattcccagtaggggcttaactagacccgattagggggcccccctaacttttgcctccacctcgctttgaatgctataatccatactatttttttttacctagacccgtgcccccgcccagtaaaagggcagtgcccctagaaaaaggctctggttacttatctaaactctagaaaggaactgcagagcttcgcgaggcggacgcgacgctacttgtcagttgcggtccgatagcgcacgcgaagtggttgaagcagcgcggcagtgtctcggacgttatcaagggcccgctgctgcgcgaccgcagcagcgtcgtgggcttcaacggagcgatcttggtgcagctggtccggcgctggcgtggtacaaagcgagtccgtcgcggtggtacccaccgtgactccaccgtgggtcaggtcgccgcggatactggaacaccgaaggtcgtccgtcgtctgaagtcgagcatcgccggtgggctgtccgctcttacgaggctctcgttgagttaggcacggctcgccgccgcgccctctgcaagcgacgtctcgtacgccgccacgcagtcggggacatctgcgagtaggacctcgcggggctcccagctgtcgtccatcgggccaagccatccaaccagataccggcggtgcgaaggtatttctccatcgcggcgacgagtgccgcgatccatgcgcgcgcgctgcggtgcatctcagtggtcgtcgtggtttagtatggctttgacaatgtgacgctggttcccagctgcgtccactagtggagcaggaccgtcgcgctggaatgcagatgcgccaacctcgggctgacgctgcgatggcgcagcgtcttgatcgacttgggcatggtcatcggcgccaccgggaatggcggcgggatggtatcgtcgcagtcggccaacgtagaacgtagggtgcagccggagtgccgtatggagccgcagcgtgtaggcgtcgccgagtaccttcgtcactttaaaaggtccattaaatcggggcgcgagcttgttcgcgcctaaattcgtcaccaaacttggcgacatgcccgtcgtagatagcagtacccgatcgcccacggcgaacgtctccagatgtcgtcgccctcgtcgatcggcatattccttttgccggtccaccgccgccgcgatggtgtcgcgtatataacgcacaactgactcacgtttctgcaggaagtcgcggacagccgcagtgtcttgggactgcggcgctgggagcggatcgaagttggcaggaaccggcgcggcaggtgtcgccgcctcttgcgcgtcttgatactcgacggcccgacgtggcatcgggtcaaccagcgtgcgcgaagtccaagctgcgatgtccgaaggtgccgccctccttgcggaacgtgtacgcgaagctcgttcggggttagcgtgtggtctctcgtgtgccgcccgcgtggcggcacgtgtgcgaactccgactgctggagcgttagagcctcgacgagtggtgacgccatgtaacaacgaggagacagcgtcggggacggggccacgacgatcagcttggcctgggtcggggtctacagcaacgtcttcatccggaacgagtgacgcgggatcgcccgcgtcttcagcagcgcgaccagccggagcctcagagcgctccacaccaacgagcgctggaacgcgaggatggcgaccgaagttgaccaagaacggggacagcccggtcgatgcgtggacagcgttgttgagggcgaattcgaccaggggcaggaaggtgctccacgacttgaacgtcgtagcgaagctgcgtagtatgtcttcaacatcacggttggcgcgctcagtttggccgtctgtctccggatgcgacgcggtggacatgcacaaccgcgtccgcagcaattggaaaagctctcgtcagaaagcagacgtaaagcgagggtcgcgatccgatacgatggaggacggaagcccgtggtggcggtacacttcgtccacgaagatcgcggcggtttgcttcgctgtgatgctggcagcaacaggagcaagatggagcatcttgctgaaccgatcaacgaagataagcacgccagtgcgcccttgagcgtctcggggcagcccgaagacgaagtccatgctgacagacgcccatgcgtctgtggcgactgggagaggtcgaagcggagcctgcttggacggattcggcttcacgcgttggcacgcttcgcaggagtacccatttccggacccacttgtacatatgcggccagtagaagtctctggacatcgacgcgaacgtcttctcgcgtccgaggtggccgccgctcggcgtgtcatggaactcgtggatcagccgagctcggaaatcgtcgtccagaggaacgacgatgcgcgggggtcttcgcagtcgacgcggtacgtgagcaactcgccgtccagcgagtagcggtcgacgcgggagcggttgcgtggagacagcttgcgcatcgggttctcgcaggagctggatcagctccgagcaggacgcttcctccttgtacgcgtccacgatcaagtcacggagtggactggtcactgcaacttcaacagcagcgacggcttcggcagtgcatacggcgcactcgtcgtcgtcctcgtcgtcaactgcgtggcgacctgactgcacgtagtcaggccgacgcgataacgcgtcggcaaggatgttggtcttacccggcttgtagtgcacgacgaagttgtactcggagaacagggacaaccagcgcgccatgcgctgggacaagtgggggctcttcgtcgttgtcctcaacgaggcgtgatcggtgtagatcgcgaaggtctactcgccgaggagatacacgcggaatttgatgatggcgtagcgcatggtcagcagctccttatcatggaccggataattccgttccgccggcttcagctgacgcgactggtagctgatgacccgctcgcgtccttcgtcatcgaactgcatcaaggcacatccgatcgcgaagtcgctcgcgtcgcacacgacatggaagggcttcgagtggtctggaagtatgagcacgggcgcgatggacaagctcgacttcacctcgtcgaaggcagcttggtgctcgggtcgccacgtccacgtggcgtctgccttgagtagttgagatagcggacggttcgtcgaagcgaagttcttcgagtaatggtgaagatacgtggcgagccactgccactgccggatctgcttctggtcctgcggcgtcagccacgcgcagatggccgcgatcttctcggggtcggcgcggacaccgtccttgctgacgtagctcccgagcacagggatctcgggagcgcagaagatgcacttcttcaagttggcgtacagcttgttcttcttcatcacctcgaacaccttgcgcaggtgttgtaggtggacctcaacgtccgtcatgccgtcctcggcacgactgtgaatgaagatgtcgtcgaagtagctgggcgcgaggtctcggtacggccgaagcaagttggacaccatctggttgaaggtggcgggggcgttcttgagcccctgcggcatcacgagccattcccacaacatcccgctgggcgtgctgaccgctgtcagcggcacatcgtcttcgtgcatcaggatctgatacaagccacccatcagatcaatggcactgtacttcgtgctgccagacatggcgtccagcaccatgtccttcctcgggatcggcgtttgcgccggtatgatggcctcgttgagcttgttgaaggcgtgggcgattctccagccgccggttgctttcttcacgcagaacgtcggtctggagtgcgacgagagattctcgcgaacgtggccggattgccgacgactctcgatgaaggcgtcaatggcttcgacttggtcgcgaggaagcggccactgccgcgtcacgcagtacttcgcaccgaacacgaggtcaatcttgtgccgaacctggaagaacggctggaaccttgtccgggaaaatctccatgaactcgcgcacgagcggagcgactgggttgccggccgcttcgagcgccggcaatgactgagctgcgtagcgggcttgatgggcgttcttcggctcggctccttttcggcgcttcctggcgtcggaagctgggtccgacgcactggttgcgacggccgcaattgactcggtgtcctcggcgacgatcatgcacacatgctcgatctcgcccttcttcaggtcacggaggaagtgtttccacgagagcacaggcagcccagtgacctcggcggcgtcgcacggtggacgtgcgacttcgacgtcgcgtacacgcggagccgcctccgcgtcgtcccccaccaggactgagatcacttcagcctcagcctcaaccgagtccgccgagggcgtacgacgacggcgcgggttgcgacgtctgcgacgtcgaaccgtacgtggagtgttgtgcgaagctgccgatgggagcccatgctcgatcacggccgctgaacgggggcgccgggacacaacgtcggcgcctgggcgcgggtcattggacacgaccgcgtcgacttcatcagggagctcccgctcgaccacacgcgggaacccatgctcgaccgcgtgtgggaggccacgctcaaccacatcttctcgctcttcaacgttggagagccgccactcgtcctgacgtggctcgaccacgtcattgtatgcttccgagaaccgctgctcatcgggcatgctcgaccacgtcagacacgtcctgaggctcctgctcaggaccggcgcaggttgcgagttcgcacaccgcacacgaagggccatcgctcgctttgtgcgcagcatgggtcatggagtcggggtccatgacggcaacatgcggccactggttaggcgttccgcacaggaacgccaatactgcattcacatcaatgtctcgagggcggactgtgccagtcagccagttgatctcaggctggtggcgggcgagccacgggatgccgaagacacagtcgaacgacccgctcagctcgatcaccaagaactcctcggaactgcggaacccttcgaactcgtacgcgaaggtcgccgagcgccgcggcttcccatcagcgtacttcacgatcatgtcgccaggcccgtcgcgaatgttcatgtccgccggtaacaccgacaagctctcggcgcgaacgaagttgttcgtcgcgcccgagtccagcagcgcgcgaagagggcgcgtcgcgccgtcaacgtggaggctgagcacaatccgcctcgtgtcactgccggaggtggtggcaaagagatgtgcacgaagcccgggagggctaggaggaggttctgtcaccagagaaccatcgttccttccacgacaggtagggcgccccgcacctactggttgtcgccgttttttggagcggcgacgtcgttcgcgaccgtgacgttcgcctgcatcggcgccggagcgcggcaaacagccgcgcgatgtccaggtttcccacagcggtggcagcgcatcgggcggggactgcgcgttgacgaggccgttggcggccttgctgatgacgtcggcacccgacgtccaccgaaccgttgaatcgcatccacctctatcggctccggctcgggcaccggagcccgagagacatcgaaagcctgcgatgccgtcacactgtagtcttcacggagcgcaacagcgaaggcttcttcgagtgtcggtggagtcttccgggtcaggtagaagcgctggtagccaacgctcatgccggagatgaagacgtggacttgggtcgccatgtctacgggatgcgtcgtgatgcacgacacaaggtgtcgtgcgcgctggatgtactcgagcatggacatgcgcccttgcttcaacgccaagaaggcggagcgctgaaccctttcagcttggggcggctcgaacgcgagccgcaagtccgccttcattgatgccatggtcgggaagcaggaagcgtcggccacgagcgcccactccttcgccttccccggcagattggacaggagaaaacgcatgcgcgcgagctcggtagacagctgccgagcttcgatcgcgatgtccacctcgcagaaccagcggttcaggtgaaggcggccctcgccttcaccgctgtacgtggagacatcgagtttcacgatgtcggacttgttcttggtctgtgtgggagtcgacactcgctgacggaggtcagcgagttcacgcgccatgaactcctgggcggccaggcgttgttgctcctcggttcccgccgtcagcagagtcttgatcacagcgtcaccagacaccgctgcgaggcggtgtagcgcctcccactcgatcgccgacaggtgaggaaagctggcgtgctccagtgaagtggcagtcgtccaggacgcgtcaggcatcgatgtgtcgttcatgttcatcacgatcttgggcgttggacggattagcgaaatgctaccagcggtaacgggctaactgcagcccgttacgtgcttacacaagcagaggaagtagtaggcaaattgaactctggtattaagcgccgagacggtctcggcactcgagaccgtcacagtcattaaacctatagtgggctctgattggccaccgcgcacacgcggtggcgcctgtgtgacagtggcctgtcacacttaatagtacatttagtagtacttgataatcgtgtcgaccttatccttgctcagaaacttcgacaacttgttctggatggtggccctcgaatggtcctgtcctcaccatcactgcgtcgttttattcaactgcgtgcgcgcaaaaattacggtttgtagtggatgtagcaaggcgcacggccagagattttttttagtgcccatggcatagcccttacgataaagctgcaacatatctctaggtcgatctattgcataaactcgtttagcaaacggatgagttgctgtaaccaagctgtgcttggcaagcaggccagcatggaaggacggggcacttgttgacgatcgaacttctcgtggcgattatgttcgtgatcatgattttgagggacatttgttgacgatcgaacctcttgaggcgatttaagtgcaagctttatagcagaatcgatgcatagttgcagaccatagatagatctcgagataaatcggagcaaccatcggttttgtctgggacggactcgctggatcaaaactatgcgatagtagtgcatactagtatttggttgcattgataatatagtatacataacaatgatactattgttgttcaacgataactattgtgatttgcaatgattttggcaatatgaggcgagatttgctgtatttatagcgaccacctgctagatttacgataaatcaaggtgcataaatggggggaggcctagaattaccctaaaagcgccacaattgcacttttgaaagtgcaattgtggctgtgcagctgcaattctgtcggtgtttatccacaagcacctacacacccggcaattatgcataagagggtggatgtactggggatcatggacagtggtgtactgggccaatgcatggctgctgacaggccctcccaagtcgatatatatatatgatgaggtggatttatgcataattttagcaggtcgtgtatcttctttcacacatatttaggagcaggctttgtcatatttaaatggtcgccaaaaaaactgcaaagcacaatactagtaatgttattaatattaatgatcgaaataataccatatgctttacaagtattagtatgattcgtgctatatgaatattgtccgctgttgagtcggatatcagcatcgcaaaaaatgattctggttgcagcacaaccagcagtaaattgatcgttacctcgatgctggtgtcccacaacccaaaagcactcaagacatgcaaatataagtagtagacagaagtatcagacgtattaaaatagttgacatcaggcctgcgtattcaacttttccacgaccgagaccctagggcttcgtcaaggagtcgcacaacatccacgtgaccagctttttccgcagacgcccaggcggcacaagcgcttggtagatcgcaatgcccactaagaagaacgttcgagtgaccttctgtcgctgcagcctccaatgcgcacccaatggattccagatcgctgtcacggagtaaggcgctcaccacctcagcatggtcattcgcggcagcgagcagaagtgcccagcggatgctgttcgcgtccattccaccctgcaagcagttcaccaatccaagcaatccacgctcggcagcagccgcaaaattgttcgggtagatttcaggatcacgattcttcacaatcgcctccaacacgacgacattcgtatcggacggaagctgctccagcgctctccacactgatgtttcgtcaaggtagttcatcaaagcatccaagacggcaatctgttcgccttgtgctgcttgctccagagccttacttttatacgaactgccgcttttcccagcgcatagttcgaccaactcgatgcgcttcgcctccaccgcaatgcagagcgcgtggccagcaccagctccatcgcattcactgagcaccatttttgctccttcaacgttgccacatgaagtcgcgtagccagcagccatagcgacggtgaaccgaatgctcgggtcgctgaagtatgggcgaagggcatcgtcgagcaagagctcaacgacatcgtagctgctgtttcccgcctcttcatacacgcgctgaaaactctaccttcacccacctcacacgaccgaagtatcagctccaccacagtcgcccagacagcagtgcgcagcatttgatcaatggcacgctcgcttgggtcatagcgctgaatcagccactcgatcgcagcgggatcaccacactctgtgacgtcccgcaataccgcagcggaggataaacgagaagtcgaatcaacgcagttgaacatctccatcacgtccgtatgtccgtgcgccgctgccgccatgaacgctttggtctgattaggtggccacggtctgagagcttccagcacgtgaacacgcccgttagctgcagcggcctccactgcaggacctatgacatctctgagaacgtgtggattccaccgctgttgtctcgtcaagttcactatgtccgcttggccgctttcagctgctgcaacgaagcatcgtggtgggtcgtagagctctgggtagtggcctattagccattcgagtactgccgagtgaccgttggctgcggctccgacgaacgcttccgcggagcagccctctgatctgctagcagcaagaccctggacgagatcgagacgccctctggtggcagcgccgtccatcgcgcggtaggtccatggcccatggactccatgggagatcagctccgaacctgcgcaacactcccggtaattcgttgtagacagcagcgtccacagtgcgcgggaggaggcaagtgttgatacactatagaagctgtgggatggcctggatatcatctggtacagcacgagagacgcttagaagcaaaggcaatgccgtcatgttgccgttgttgagcttgaggaaggaatgttgggatgatttcgtaataagtacgagtttttttttcatcccgacttccgtttatgttaatgatatcaagccgccagaagatatcgtgttctgttgttgaggactatctatatgaatgagtggcttatgtgtacatgaagcagacaagcgcgtcgatagaaacgcccacttaaccggaaatatgtttccaacggtagttgcttgctatttgtaggtccacaactggtcaatttcaggatgggaatgtgccctagtgaggatgcaaatgtgtcgtgaggatgcaacggatacaataatagcatgggacttggcgggaagtgacacccgcctacattatacagtagagcggttaattctgttatcggggccaagactagtacaaggaggtcccgtgagaacccgcgtcaaccaagatcacttttcaacttcgaccctatcagccaagcaccttttgaagaaaccaacctaagcacaatgaagaccatccacgctcttggcactactgtcagcaccctcgcggaagtctcaacgacccatgctgccatcgtaacgacacctgccgagatcgacgccttctacgataaggccgccacgaattgcactggcgtctcggtgttcgtccgcatcttcgctacttgtggcactgagagaaccgaagacgaggccgtctatgacgagaaagatgcaagcaagaccatgttctgcgtccccaaccgggccaagtacctcggagaggctaaccgtacgttgtcgtcgagtcttacgacgacgcctactgcacgacgccggggtggtgctcgaacgcgtatctggcggatgggaaatgccactagtacatgttcagtaacgaaggcgacgcccaactcacaacagttgatgaagacgggaccgtgaccatctacgatagctgcaacacttctgccacaccacaccgccagcaacccgcttcgagcttcgacaccggcgagtgcattgtcgatgctgacggcgaatccagcgcaaaatattattcggtcggccagctgaagcccacagcaagtgcgagcgcaactggggacgtgagtgggtcgacctcaaccagcgctgcgggcacgccttccaccacgacttcagctccggtgacaacctcaacaggatcgacttcgtcggccacgtcggctccggttctttgctcgattgcatttttacttgtcagcacggcgctgtcggttgtagtggcagtttgatcgagagagagagagagagagagagagagagagagagagagagagagagagagagagagagagagagagagagagagagagagagagagagagagaaccagatttaattatcggctaatatattttgatatcataaaaagtaatggctggagggtatatggtcaagcttctggggaagataaaacacttctcagtggatcatctggaagaaatattttcctgatttatcttctttatataattgttttacttgaagtaaagcattccaccgccgaggtccaaattgtgtgcgagatctacctcgggttctgaggtgccgtcgcacgtcgggcaagtgcaagcgtttcctttgctctgaagtaaatatggcactggagctatcccacatgaggtgttaacctttttgcaacagcatttatagggtatttgtagactgcgagacgcaatccagcggttttgctggtaaatttggatgggactgtgtgcgacgacaaccgacacaattgaaaaacttgcacctactgcagaatccgctacggccaagattcaacggtactcaaacaaaaatggttaacaggattctattggcaggacactagatagtggtattcgcggggtcttgtcaatatttaacggaccgagaactcattcttggaaatcccgtaaagcaaaaccacttgctgatttcaagcgccacagtcgagcatctccaaaatgaagaccactctcgctatcagcactgctggcattctccagggagcctcacggaccagtactggcattgctacgacgacttctgggatcgatgcattctacgataacctggagtgtactggcattccagtattcgtccgcctgtacccgtcctgtgaaaattcaaacaccgaagtcgaggctgtttgtgactcgtatgattcaaggaagaccttctacgtccctaatgaggccgagtactttggagagaaagacccatacgtggttatcgagtcgtacgacgacgccaactgcttggaggtgggcgggatgactcacgcgtatctgccgcttacactcagctcacaacagtcgatgagggtggaatggtgacaatttaccctggatgcaatacttccgatacgccagaattccagcagcccgcaacaagcttcaacactgatgactgcgttccagtcgacgacgatagttactcaaaatactatttagtcaacatcgacacgagtggaggagatacgagtgggtccacgggtaccatctacacgcctcctgccacgaacgtcagtgcgagtggatcaacgagtgctgctgggtccacgagtgctactgctgacacgccttccgctacaactacagctccgacaacagcgacaacgggatcggcttctttggcgtccaattctttgctcagtcagcacagggctgtcagctttagctgcgttctgattcaagacactggcccttgtagctctccagcaactagcagcatttctttctttctggtagccattaaataaagccaaacatcattcgaacgctatcgatacagccgctatctatcgtatcaccgcataccaggtcatcaacgcgacttcattactatttattggtaccggtgcgttttgtgttgcgatgtcagcatcaatggcggtgcgtctgagttcagatctcgattcacagctgcgtccggtatttctttcacttcgcatgcttgagatcctcagccctaagtacctaacaaacaaactcatatgacatgcgagtccgcctggcaagttgcaagagctgtccattaatttaacggtaccgaccgccaacctctactccatgccttcgtcctcgtcaccgtcctctagctgctcctgggcgatctccctactgagcctcttcctcgatcctgctcgaactttgagaatcaactgcttggcctcctccgggtgcatcgtgtgcaattgagccatcatctccatcgttgacttgtacacgaacgtatgcggcacttctttctcgatgtttacggtcgtgactgcatcaatattccgcacactcactctacgcgccaggatgggggccgccccaataatggtcgtcgccgtgtgtttccgcttgcccgcgtagttgctcgctcgtagcatcgagtggttttgggggatgggagttgtccacgactgcttgttgcggcgccgatagcccgggaagtcctgcagcaagcgttcgtacggttcatggtccagtcggtacaactccgcgacactgatcgcgatgcacgtctccagacgggaaatcccgtacagcagcgcaaactcgccaaagtactcgcctctctcgcgcgcttcctctccggaatccatccttaccaagatccgcccctgagcgatgaaatacatgctgcgatccatgtcccctttcgtcacaacctcctcgccttcagagcagacgacgtactccaagcacaccaatagcccgcgtaaaaagttctcgtcgagagcgcggaacacgcgcacttgggcggcaaagtcccgctgggtggcgaacacgacgtcttcgtagagcgccctcgagacgtccgcaaccgaagcaaactcgggcttcccctggtggcgtttccacattcgcgcgtagtaggccttcacctggcgtttgagtccttttggcacatcgttctcgttcagaaagtgctgcaactccgcgaggttctgctcgaacgctgcttcctgtcgcgcttgagcgtcgatccgctccccctgcgctccgatcagtgcgccgtagatgtagatgctccaaaaggtgatggcgatctcgaccaggagttccaatgggttcatcgagagaatatctccatagaagagcgtcgagatgcactccaacgagaagagtagcgaccggagatactggcgcccaagcgagatggaatcaagcgagaaagcgacggacgctacctctgagagcgagcgatgtgcttcaatcacgtctgtcgccattgtctcttccattctgaaggctaacatccctggagtcgacagccacgacaccgcgtactgccatagagccacctcgctcgtgatgaaccagatacacgccaggaggtgtcccatcgcgatgtacgcagccaccgagcggaggaaatagagcagtgcttcactcaccggcagcttgagatcgtggatcgcaaactgaatcaactcttctgacatgggctggattcgacggacaagcagcatgcggttcagcctcaagacccagcgcgtagtccaccaggacgcattggtggcctccacgccgagatggatcgcagaagtcggcaaccgcaccctcgtactaaccagcagaagctccagtgggagcatcgcgacgagatcaaagcggaattcggaggtgaagctgttggcgaggaggtgtcggatactctccttcgccttgcccgtcggatcaatggcaagtggttggtgcttgggtaaggcgtggagcattttgtagacgagatcgactagacagagcacatccaggaaaatctcaagccccgaccaactgcgtagcacggcgtcagatatgacggatacctcgtgcgcgaagcacatcttgaaaggcgtgacgaccaaatggtacacggatacgaagacgatgacaaggtcccaggctttcccgagctgcttgacgcgcctgatgaactgtttcgactggaagtcggtgatggcggctcggagcacctgctggttggggatttggagctgagcggtgtccaccacctcggagcgcaaattccccggtcgatggtggctggcgagtctcatctcttcgctcaatggagacacctgggtcgtcttctggttaaaacttcctcccgtaaaaaaacttttaagtgctggtatagtctcgctctgcaatttgctcttccagcgtcgatagcggttgtaccagtgcagttgcgtcgcgtactgcgggcgttggcagcgctgtaagatttcaaagtcgattcccgcgcctcctttgcggtcgtcgttggctatacggtagtagccctcgtagtgctctctgtctcggaagaaggcgtcgccaaagagcgtaagagagcgacttcggatcagcatctgccgcttgcctccgcccttgactggggcttctttggatgacgggaataaaactttctggtcgtgcacttgaggcagaatagcgggaaaactgcgtctacgaaccggagcgagcttggtactcgcccgcggcatcgccacctcggcttcagctatcgcggcctcgggcccaatcgtctttcggcgactcacagacgacaccatttgcatgatcgctgcgctccacttgcgcttggcgcgttcatcgaagcgaaaaggtcgtagttgcttgggctttttgggcttcacagggatatgaattagcggcgattgggactccacaccggcgtccgaggggatcaaatcgctaagaagagaactcacgacgtgctgcagcgccgctagtaaccgaaagcgcgcccaactctccgtctccagttctcggatattatccgcgcccagattcgcgttaatgtactcgttgatggggttgagatccacgatatactgacgctggcgtaaatcgtccgtcttgctcgcacgagtatccgctgaagagtcgtaaactttcccattaaaacagcagcagaatggattgtaggtttttgagctttcgagatgatgcggagcacgttgcttcgagtcgcgtcttgttgatgactcgcgatcggaaagggactcagaacacgcggtgcttttcgagaggagatattcagcctttttctcgagcaattggaccgttggagacacaaacatccggcagatttccactttggataatttccgtgggggagtcggcgcccaaagtaaaatgtgcccgtcgctgcttggtctacgatcaggtggtatggatgattctttatccttggcaaaaaatctggacggtcttctgctggaaggcttcacactgggtttgatgctgggtcggcgtgtatcgaccaccttagctctactagctgtgcgcagacacccgcgttggtaccgctgaagacgtgaatttacccacccgaggatggcgaactgcgcgtgcttctggacgttgaggtccgacggatcgtcgctcggaatccagagctcctgccagtcttgcttggtgatatacaggacctcacacgatgtcgtagcacgcacggtagcgagtcgtcgttggttcgggaggaagaaggcgatctcaccaaagaaagagttttccataagcacagccacactcgcaacagactttgtccagtacgcggcagctaggcctttgcgtaaagtgcataatcggcttccaaaggttccctcaactaggatagtatcgcccgggatgaagagctcagactggagccgcaatgccagattgttgatctgtgtcgccgtgagaaaactactaatcgggagtttctcgatcgagtagccgtatttctccagcatgaactttagtcggagattggccgacaaatcctgcatcgtcttgcacatgttggtacctttggtctgctcgaactcgactcggaaatagtagacaacgcgcttgcgtagccccggcgacagctcgtgctcattcgcgaagttctcgaagctcgcgattcggttcttgtactgctttgtctccttccccagctcgagaatcagttccgaaatctcgccgacgatgtgtccgatgacgaaagtgcagcacaagcacgtaaaccccgtccagagcgtgcctgccattcccctcgggatgatctcacgagaccccaccagcagtagcgtcgtgatagcccagtagaacgtcttagcgtagaggataggcaccgagtggttattgtgcagcacgggatcatgcgccatccagcagcgttcaaggtactcgcactcgcgctccgagatcaagaagaaaatgcaacccacgtaatgagccacaagcacgagaacaatgagcaacttaacaggactcaagtacgctgacacgttgcgggcagcaaagtgctgctgaatttggacgattacatcgtccagatatgaccataacttgacacatcgaacgagccgtggtaggcgacacaagctggcgatcaaggagccgctggaaaatggggtataaatcggcagcgacgcaacgagatcccatttaaatgtcgggctacgcaggtactgcttgtttatcagctttcgttcaatgagatttttcaccgtcacttcggccaggtcgaaatagaacaaccgcaagtaaatgtccactgcgaagcacacatcgcagctgagatcagcaatccacactgacgcactcgaaaagtgaaggtgcgaatggaagcaaatgcgaaaaatcacaaatacagcgttgtacaggctccaaaacgtaacgagggcgttccacactgtcgtaaaggtgtcagatattgagtacagcccgtgtccagcgtcttcatcgccactcgtgataaaaacgttatctcgttggtaaaataaactcggagtctgaagcaggtgcggctgcaacttgatcctagcgaggtttcccataacgctcttcatgaccgccctctcttcggtccaatgagtgtgcgcctcctctctcatatcccgaaggtcatctgcaaacttgcgctgcacgcagtcaaactgctcccgcgacatcacggacgcgtggacgtgagacgctgctatgattgttgcagcgtgagcccttttgagcaagaattcgtttacgccgtagcaattccccgcgtgaagcgcacgaatgggcacttttttggatcggaagaagaggttcgctcggctgccattcaaaaatacaaagaattcacggcaaatatccccctccaggcagatcgtctccccattctggtagcttcggtgccggaatttgcccgtgacttctcgtatgaactcaatactagctgagtcaaaaagagggattttcttcacagccctcgaatgtaacagcgacgagatctggtagcacaattgatcgggcaagtgcgacagcaactgcgactcatacgcttgtttgtggccaacgaactgctggtggtaaaaccgtcgaacttctgcacttagtcgcttggaaatattaacccgctccatgatgctgttgaccagattcagtttctccatgtgatggtggtgcgtcgctgttaaattcgaaatggtgctcgacatggcccccatgaccccaaaattgatgattccgccgaggaatacccaaaacgcggcgaaataactctcagcggtcgagtaagctacgatatctccataccccactgccgtcagggtcaccatcgcccagtatatagatcgtaaataggcaaacggggcttggtacatagagtctgggttttcttgcggaaactctagcccgaggtgtccgtagcagtcaaatttgacccacgagcaattgtagaacagcgttgcctggtggagacagtcggagcgcgttagctccgctatgaacacggcgctatctccatggtcggattggctgtcgggtgggaagagggccatctcgaaccatacacagccgacaatatgcagcatgagcgtgacgcccaaaactaaagttaagacgatacgaaactttgagctcgcaccgtacaaatcgctgagttcgtgtagtaaacccggcaacaatcgcagtcgcagcaaacgaagaagtcggaaaattgacgagtgaacttgtagagaaccggtcgtaatagaatccaaaatatcgcccacagggagccaagcgagcagatcgagataaaatccgttggatttgtacgctgcgaagatcagatccgaccgaacgatggacagcataacagtgtggtccatgaacgcgaaaaatctcgtgcggaggataaggtcgaaagtgaaaaaaaactccacgagcatcgtcacgacgtatcgtagatccatcccagtgtccacgacgaacatgtgccgtccttcggtcatggaaatgaacacggcaaagtacggaacttcaaaggcaacatacacgatagccattagacggaccgtatcccatcccaagcgaaagggtgagccaggaagtctccaatgcgtgcgttgcttccattgcgctccgacaggcatggggccatgccccggtgaacctctcccaatagaagttaaactcttccctgtcgagctcttgccctgagagctcctactcttgaccgcagagagtctgccagtggaaaatctgccgagcgagctcctcccgctcagattttcatacccgtcttgtaatccgaggatttttttcgtcttccgaagttgcaactggtatttctcgagagattcagccatgcgcaaccgagttgcatgttccgttcctcggtgatattcggataacgcctcgtcgaacttggccttcgtcagaacatacaattcgcagaaagtttttgcaaacgctctctgcaggtagacttcagggaagagtaaacacatttcggcaaagtggtcccccgtcttgcactcatttggcttgccaccaccgagacttgccaggatcacttggcctcgaatgacgaaaaacatctgcgcgttgactttcggctcgataatctggtccccgggtgaataaattcgccgcgccagagcgagagcgagctcgttgatgaactccacgctttctttcatcaagaaacaaacctgcgcagtgcgattcgctcgcagagtagcgatgaccttggactgcaagtgctgaggcagaagatgcagagcctcctcgctgtccagacagtggtgcgtactccacgcgtagttgaaatacgcagtcacttgttgccgtaccgagcgcgggatgttttgcagtcgcatgtactcgcgcgcgttgtcgacgtgatgggcgtacgctgcgtatcgagcgttgcggaatctaaagaggaacaggaaattcgccagcattgacgtgccaaacaacgcgcccatgatcgtcacgatgacaacgtagagtgtttccgcgttcgagactggggtcacgtcgtcgtatcccagtaaaaccagagttctggacgcccaatacagcgtgcgcgcgtacttccgtcctaccgaagcgccgtgaagacggtcgcgcaccacccagcttgattcaatgttcgcgtcgcattctgccaggtcagtgccgcactgcacgtgtgctatcagcatatacccgcaggctacccaatgacacagccctgcgcacaaggcgatagtccgcacgagactgtcaataccagcagaagacaggtactggaccaagtcgcggtctgaatacagcttcgcgaggcgtgtaaggcagctccgtaagcgatacagtcggcacaacttggtaattcgaaccaggtggagcgtgttgaaggagcctaaaaccacggggatcacttcaaccggcagtagcgcgataacttccagcaccagctctgcgttgctgtagtgatgttgagagctggagcgactgcccttgtcgcctggcattgccgatagcggtttaatcgatgaaatcgtccaattcacgcgcccgagctggaaattattggcggacgagaggcgccgtacgaccattttggacgccgagacgcggtccgtgtcgctggtcctggtccggtctttggtggagcgcagactcgcgaacgtcgagagctcgtagaacaccgtcctccacagatcgtaaaacctcgcgaactgtgtcaccccgatgaaatccgcgatgcagtcgagcgccacgaagaccgtaagttcttgcgtccactcatgtgtctcggaatgtgaccgtgtatcatagtagaaagcgactcggagcggcaccgtaagaaagatgtagagcaccatgtagagctgcacgccgatgctgatcgttctccttgtgacccagggaaggcgcttgtaggaccggacaactgggcgcgtgacgccgtagtagactcgctggtagacttggatcaagactcggtcaggccttcgtcgaggaatcacctctaaagaaggaccccctgtgttgaggccgatggccaggggcgctccgccgccgtctaccaagacgctccttgggccgctccgtgctgcattggggtggattttactcggagccattacgacagaggtctcaaggtcattgagagccgcgttcttccccgtgcaacgataactcaggcgagtgccgagctttaatcagtggagagatgagtacgcgtacgcaccttcctctgggctatggtagttaagctgttttcgcagcaggcaataattagccagccacggccaggggtttcgagtccaaatcgagctttgctgtcttgtcgggccattgcagtcgtgacgacgtcgcagcgttcgttcatgcgaaggtgggtcgtattccgctagcaccagtgacgtcggcggcgctgggctggaagtctgtgggtgcgtgtcagccgcaatttttaatcgctaaaacatgcgttttgtccactaaagtaacgcagttttaacctcagatttatcaaaagtgaagtgcaaaatgcggcagtggtacctaacccacgcctctaccactttgtctactagcttcgccgttgaagttgacgttgctacactaacactgttgccttcactttggatatagatatacgacgcagacagagtcggcagcatacctgaaaatatagcaggcattttgttgaatatattggacatgaagggatgacaaggatgtagtcgtcactttgttggagtgaccaatgacttcaaaattccgtggatagacaacaaatgaactacttcgaagtattataccgtacttactgctcctttctagcctgtttttggacctttcccatcgtatcaactaacagcttgaaaattggctacaatataagaaaaaaggaaaaaatcggcctctggcaccaatcttctttttcaataaaagaatatataagaaaaatcaataaaagaaagtttaccatccctgcccgaaacgcatccacaggaaacaccgtagtcacgttcatttgaaaaggtaatggcgtctggtaccgcaattaatccgctcggtggcgctggaaccttcttcaggtaaaatgaatcagttgaggccagcatccatgtgatatggatcaccgtggagcatcgtcgaagataaatcgacgtcgtcgaattcttcaggttaaatgaatcaattgatgccagcatccgtgactcggatttgtgaaaggaatcattttattttcaaggtgaggtatgttgtgttcatttagatctctaggctctgctgatatgtgacaggaaccaccacggggcatcgtcgagggtaagtcggcatcgtcgggctctacatttccatgaccatcggctgcgattgatcaggccaactgggcatggtgtatgtagcaacttccacggatggtttcaccccacagcaattatgtcatgggcatcaatctagggttgaaagtggagccagaatcgccgcaagccatcatttgatccgtcagaaacggagcgacaaacgacaatgcaaaggtaagcttgccagatttatcttcgtccaggagatatttacgtgtgggattattttctccagccgtgaggacgcagcacacgtcaccgggactcctgacccattcaacagtacacttgatagcgttgtcgatctcggcacaaacagacgagcatttcctccaaatatgtcgtagcgtcttgtacagtaagttcatcgtcgctgatcttgaggttgaccacaagcgctgtttctaacaggtccatcttggcatgcagagaacaccattacattggaacgaagctagtgaacaccaccgtcggccaatacttctttatcagagccccaccacatatctctttcttcaacttgtccgcttccagtaaaatcctttgtctgcaacaggcgcgtacttgagatcctccccattctggcaaagtgccttttatttgcttcattgcactcgaacgatgttgtagatgtctgggtgctcgcgcctgaagcgatcgtaaaagtacgagtacaagaccgacgtcccaatgactacagctctagtaaaggttgttatgaggaaaaagtaatgtgatcaagtaacgcacgcactatactgtgcctgcagcgttactgtaatgcatcttcttctcgatcagaagcaaattctcgatagtttcgtagtattcgttgtagcaagagcacacgcaaatggatatggttccatcgccatcatactggcgaggcggaaccaactttagcattcgtaagccctccttgcgtgctgtcatcctagtgggtctatcaagaagaaacttccgacatctgtacaacatatatgctaacacaaaggtattatgttgcaaatcataacaaagaggtttcatgaaatagttaaacatatgatttttctccaaaagtacagtgcgtcgaagcgggttcacgcggtctcccccacccgtgactcgaagcgcgctcgtactacggagccaagcctggaatacaagcgccttaaatatgtccgacttcctcgtgagatcgtggccttaccacacgtgatggagcggatcgattgcctgctaatgacgcgcgatgaagctgcggaggaggcgatacgaactcgagacagccggtgctgagtcgcgggcctacggacgatattatatttgagggggctctagccgctgaaaagggcgacttcaatgtggtgcgagatttactggaagagctggagttcgacaacgaagagcacacggaagagtggcgcatcctagaagaggccgcagccaatggacatctcagcattgtggatctcagtatcgagtccttggatgacaacgccgaacgagactcctgtggctatgaggaaagagcccctgacggaaggaaagaggcattggcacgcgcgatatctgctggtcactatgatgtggtcgatcgtctaactctttttatgtatggggcggaggcccccttacccttgtaaaccactcaaatctaagtctgtacctgattggatgaaataggtctggctccccacattcaacgaatcagaatacgacagcaggtcacacgctagccgtgtgactgcacctagttttgtgtatgaatctatgtagcgtctacctacttatgtaaatgggacttttacagcaggagctcgtagagaacgcagcgtcctcaagcacgacgatccgtaagtactccattaactcgacaaatccacgtactgccaaattttgttcccagtctccatctaatattttgttcttctatgtttcaagatcagggcaaattttccgttgtcgatcttggggaggatccacacaggctcgctccagatagtacagcccggaacgtgcggggtgccctgacaaggcgcgtatagcttccggtgcgagcggagctgagtatacaccctccattgcatcttgcccccatctgccatgtctacgagtttgggagctatccacatgacagcgttcaagctgccgaacacctgttgtctattgatgtgtgtattcttattaaatgttaatccgagatgattgaacacactctcgtaactgttcttgtgggtgttgtacgaaattgacttcgtacaagtgcgaccacgcaaaaacttgacgtcataccaacctttagctgtacgaaagaacgggaaggactccaaatcgatgtgaaagcactcgaataggtaaaacgcaactgcaccgacaggacataagtgaacatatttgttgcgaatatagccgacgtgctggagcttccggtacgtgtttgtctttcagtgttggattagtataaccagagcgatacaggcctgaaatccttccccatccagcgcctgagagaacatgttggccagctcgaggtcacgtatgttctccccgcgtagtagcccatagtgcgatgccagaaacgccgctcgaccacgcagatcgccccccccccccccccccccccccaaaaaaaaaaaggtgtcacaaatctgtcggaattgtgtgacgaggtccgtaaaaccttttacgcccaggtgtatagcggtagcccagaaaaggagagtgagttacgagcaaacctttttggaaaggtaaaccctgaacgcagatttccttgaacgcaggttctggggaaaatgcggccacggtggcgtggcaccttgtgaatccctatcggtgtcgtttatcttcggggagcctggatcgatcaccaggtgagttgtctgtggggttgaaagccttgagttcgttgagcgtaacgttcacttgtctgaacgcacttctccgaaatgtctgaagctcgaaacgtggaaggatcagggttaataccacaagttagaacaccagaactacacaccactttcagatagccaatacaaatgcagagttatacacaaacacttattcttagaccctcgggcggtgggtcgtacaccagtcaactaatctgcgatcaaggtactggccaaccttgaacgcactttcacacgcgcaccaccctaaagatgagggaaatatacagaccaaagacagtccgatcctaaacgtagtcaatcaaactattcccgggggcgactgctaccataccacccgagatatcaatcgttaacgtgaaatgggacaccacccttacctcaaatcaatgggcccaactgggaaatggaatacgtggatgacttcagcagccggagcagactgatccccacgtaactggacttgagtgtgtgtgtctggagcttcgtactgcccttgtccttaaagacagcgaatccgattcctcgacgacttgcgcagtaaaactctttattttcctttaaaccattttgaacctttttgaaactgtttgtgagagagttcaaccacctacacgccgggtgagccttggtccttggtccttcgacagggaatgctcgtcctccgagacttcaccgcagatcttgatcctggtcctttgtccttcgacagggaatgtccgtccttcgaggcttctccgattcaacttgtccagtaggcggcaaaacgaaccctctgattgttatctgctagactatcgctaggctttgtgtaaaggtatctctctcgtagcgttcttgtgtgttattgtgttctttcccagcttcaatgtgcccgtgtctttgtgcacgactggcccttgagagaccttgaacccgcatctggaaccatactcaaggccttgcggccaagggtaggttgactcttcacttggtcgtggggcacttggcaggacttcttccgggtagccagcgttctggacaccatgcacgtgacttcactggggtggctgagttccgggtcaccgaattcgatgtgcgttcagggcctaggcgaggcgggacaccatacacgatacgttcgtgcaggcgttttcgacggcctcaatgtgtcaacccgcttaaggacggaggcggcctggacggatcgagtgcgttcagggtttctcgtctgaacccagtctttcaggcctaaagggcccatcctaggcttgagcgcactttgctccgcggaacacagccgaattccagcttagatcttgtcgcacggtgtgcagccgagtccgggttcagtctcggccaatcagaatggcggattcagtcgagtcagtagccaggtgatgaccggttgatgtaaaacctcgctcagtctcgtcacaattgcccctcagagtgatacccatcgagcaacgaacccacaccacgatcttggtagttcttttttcgtggttctgttgcttgggcttgtacattctttatcagctgcttcacttgggccgatcggggatgaacgttcgaattaatcttcagcgcgacttgttggttgtagagattggcgattgcatacacgtagccgcaaacagtagaaccgccaacgaacgtgtccttcgtctttttggattctcggcctacgacctgctccgacacgaaaaggtgaagcttcccttttgttccagtggctccatcgcagaactgcttttcgccgcaccaactccgaaactcagtctgatagctttcatattttctcttcgtgttgatcggacgagtatctagagttgcctgtagggtagcccgttcgcttgcttctatctgcatctgcaccgcactgtcattagactgctgctcttgtctcaaagctgccgttgctgccgcattggagcggatcgagatgccagacttcctccccatgttgtcccgaatgagttcaggtaaaaaaagaaagaaaagtattatggttagctccgaaatctgatagttgacccctgtacccagctgtgatgatacccattaaataccaatgaaaaggttaaataactagggctccgcgaaggctgggataggaggatcatggtataaccctcccctccttgttttattgattacatttcgtatgagctacggtcatctcctacgcctgcttcgcagccgcagcatcaggccggaaattgtctttaagactgtagatgccagatatcaactggcaacgctttacaaaattaaaaatgcgaaccttggcttagatatgtttgctgcttttagaagttttatacttgaaaatgccaatgtttttttctcgctgcataaaacttttgataccagagttaaatacttcacaggggttgttagtgacggcatagccgcctggggtgtgaaacgtttgccacctccagtatttccgcgtgggccactgcccttcgaaatactccgcgaaattcttaagcccgtctactttacgccaatttgccagagagtcatctctagtttgatggaactctgccagactcgacgtataatgcatatccatgatgccctccatgacgagtttgcgggaatggtacgcaaagtgctggacacgcttacgtacgttataaagtacgtgaaaaaacacatcgtcaccttactcgctgcaaactctgggatctcgctgtatgaattcacctgtgcgtcctcggcgtcgcccatgactgcgtccactcgtaacctcctacctcggatttcaaacattgtgcgaccgaaacttaaaaagcagtgcatgtaatcgcgacaggttcgttgactcacgacaaacatcgcaccaagtttgtacgaccgcgcacgatcggtaagcccgcaagtaatgactggatacccgatatcactaagtttgaaagtagcgtctccagggaacatcgagaattggtcagatgaggaatacttaaggcaatggatgattagtgccaatgaggtgatacctagcgtgaacgggtcgtcgtccttaccagaacccacgtacgcatggccatcggcatccaacatgtatccaaagacaaatgctttgtcagaagcaatgtccgggtggtacgcccgtgcacgtacaaattcttggacagccttgatagtgtttttcgcgccttgttgcctacggatacgttttaacgcgttcctaagttgtttagcgtccggtcatccgcgccgaggtggagggatgtttggctgcttctttaagttgactagaatcgcgcgaggaggaacaccgcattcatcctgaagagtaatgtactgacgcattaagttggctacgcgaggaggggggataaccgagcagggaaccgcgcctcgagcatgaccgcatctatttaccttcacgtcccattggtctcgagctttgcactcgcgcaccttccagacaacatcgcagtcaccaaaatctttgcaggttgggcttgaacataaccgcctccgttctatcatagtgtgctctcctatgcacattcggcagaacgagaacacaacagtgttgaagaccgctgagcaacacatcgcatcatttcgatagtcttcgtaggcatcttcagactcaaacacccctaacgcgtgctattcggccatgcttgggagaaagctgagagtgttgcttgcgctgttagctttctgagagcgaagaatgctatttttatagcctcggcttcggaatggagcggactatgtatggaatggatacactagcttgcttttgtatgctgcgttctgctcgaatatggtttggcccaagatttgtatgtttcgtccccagaaatggtatgtttttgcaccctgctcgccatgacactggggcgaagtttgcaggctcttcatgcctctcaaatgccgctggtgtcaatttcgcttggacgctcccgacagatttgggttcgtttcacctcctctgactaaaaacatgggctctacattttccggaaaataaaacacatcgcgaacctctaacagacgtcgtgtctgttagagttacaagtgaccgtatgtaacggagttacacgagagttacccgaagggttatgaagtgggtacacactgtctaacgtatatcagtaggagaatcagtacacggcttcagatggagtccgcgaggtgtacggactcgtacgttctggtattagaacgggctatcttaagctgagactctgtgagtctgttaagtttcctctgacgcaaagctacggcagccccgctgcacttggtagcacttgtagtcaatccgacacctgagtctgtatagactgaccctctgtggagaatggagcagttcgctcacttgccaccgaaccagcaggatgcgcttaaaaagcgtatgtccttgctgggcccggagggcgtgacgcaacttgcgcagcaaggccccgacgcggtgaacgcgcgtatcgaggcgttttcaagccacgagaatgctcttctagagtacctccagcagaggatggcgacggccgcggcgccccaagctcccgcttcgtcatccgacgcgggaacaagacccaagccgttcatgttgagcgtgaagaccttcgaaggcaaggagggtgaaagcttgctgctttggacccgttaggttgatatggcaatgagctcagctctactccggacggagtcgcagcgcgtggcactagctatctcgaagctcggtgggcgagcgagagagtgggtactaacgtccgggacgttggtcgaggtggcctttccgacgtgggaccagctgaaacagcaattgtcccgagtgtttgctccgcctaacgaggcgtatcgcgtgcgctcacgcttcctggcaaccaggcagagcaagaaggagttgatggagagttgagaactttattgctggtatgtccgcggaccccctgccggaggcagtcaccgatacggtgttcatggagtgcctccgcacttgcgttgccagaacggaggtgttccgaacccacccgagctcttttgaagagactgtgagcgtcgcattgaatgcggagcacaactttaagtcgtcgagacttgggtggaatgcgtcttacgctagcgcgtcgagtggtccggaacccatggacctcagctatgcagaagacgaagaagccgagcttcgtgctgctgagcagtgtcgcggtatccgcagatgcttcatctgtggtgacacccgtcaccttcgtgctgggtgtccgctgcgccatcagcgccaagcttcgataagccgctcttcgagttcgaaccaggggtctggtttgtctcggggaaacgagaagtcccagtaggcgtggggtggcctactggggaagaactaagttctattgagcctcagcgaggtggaggtcgacaggacctagccccgaagagagccgtactctctaacacggaacgtgtatgcaagccgggcttgctagttgtccaagcttgggtgaagggcttcaccaagccatgtacgatttgatcgattcgggagcgtcgggtaactactcccggcgttctacgatggacggaagtcagctttatgctgaggcgctggtagcgcgcgggagtgacatcgtcactgttcgtctcgcgacgggcactcgtgtcacggtgcctaaggtccctgtggacctgggcgtgacgtttttgaattttgatagcgtgggacgctgtctggtcttagacctcgattcgagatatgatttcatccttggtatagcgtggctggaacgccacgagccttggatcgattggaggtcgaagacccttggtgctacgcacttctctcctagcggagcattggcgagtcatgaacccacctctgctaggaagcagaagcgcttctggcgcgagcactggaccgagtcggtcaatgtgttggacatcggagtttccgagttggtggacactgaatgtgtcgagaacgagagttccgagcgtggctcgcggacggcaggtggagcggcactaattccgctgagcgggcgggcgtctgagggcgacgccctgctgcgtgccagcgacggcgcggtcggcacgatgccgaagaacaaggggctttgcccggatgaagatcgtggagtggcacgtaatccactgagtggaggctgcggatcgtacagctctttgctgagtgtcggtaaagacactggagctcccccggagctgaacgaggtggtgacacctggcgtcaagacgcacgcgaaatcacggggctcttcagggctgacggtgtccatgaagaggaggcagcaccgcaaagcgctggctgcgagacgcaaggcgtctgcgatctcacgagtcgagaagggcgtgtcgagcggcgaggctccacgcgagagcgagcagctctatacactcgtgaatggagtgacgggcgacgtcgacggaggtatcaacctcgacgacttgccctcactgtctgctctcctggagctgggcgagatgtccttggccgagttcggggaagccttgaaggctggagacttggctgaggtagtggtaatacgacccgaagaagagttgaactcgtcctcgcttctggatgaagctgtcctggaagacaccaagaaggcgctgaatgtgcggagcggatcggcgatcctgaaggacccatcggatgccttgtatcaagtggtaaaggattaccaggacgtggtctcgaaggagccgccctcggggctacctccggatcgaggtgttcgacacgaaatcgatttcgttccgggaacgaagtactgcgtgacgaagcagtggcccttaccgaatgagccgtgtggcatcattgacgcgttcttccgtacgaagcacgaggcgggcatggtgcgtgagagtaagtctccacactctacgctgacgttctgtgtcagaaagccgaatggcaagtggcgtatcgtgcatgctttcaacaagctgaataccgctatcattccggcacagacaccgattcctcggaaggatgttcttcagaacaacatgacaggatgtacgatgtacagtgcgctcgacttggtcgatggatattaccaattgctcatgcagacgagcgacattcctctcactgcggtgagtagcccgagcggcatgctctgggagtggttggtgatgccccaagggctttcaaacgcgccagcgacgtttaatcgtcttgtgacgcagctcttcaggccccatcaggcgtacgcgcaaacgtacttcgatgacatctttgtccacagtcgtgctgagcacggaaatactgatatggagaagcatgtggagcacctgcgtgctgtgctcaaatgcgtgcgtcaaaacaagttgtacgccaacattgacaaatgcaccttcggagcggaagagatccccttcttagggtgcttcatcgggaagcgtggtgagggccgacccggtcaaggtcaaggccattgttgactggccggttcccaagaaccaaagggatcttcgcaagtggcttggcttagccaattacttgcacaagtacagtgagaactacgctgagatggctcggcgactttccaacctcctgaagaaggatgcggagtggtgttggaacaccgagcatcaagatgcgttcgcggccattaaggacagtctccttcatgcgcctattctggctttgccagacccccctcgtccgttttgtgtcgtctgtgacgcctcggactttgccatcggctgtgcactgctgcaagcagacgccgaggggcgcgagcgcgtggtggcgttcgaatctcgccagctgaaggctacggagaagaactatcctgtccacgacaaggagctacttgcaatgaagtatgcgctcgtcaagttcagggtgctctcagccgttcgtgatttacacggatcatgcgtcgttacgcactgcgactcagtcgcctcacctctcgcaaaggatggcccgttggctgtccttcttcgcggagtacaacttcgtgatgacgtacaagcctggcaggcagaatgtccttgcggacgtgctgtcgcgcagaccggattatgagctggctcatgtaacgaccgtgacttcggcattactggatctgatccgaacggcttataccaaggacaacacttgtgtcgcgttgctaaaggttctggggagcaaggagtttcaagactcggacatggaattgtcagcgcggctgtgcgcgcggctacaccgttattccctcgatggaggcctgttgttctacaacactggccccgaggatacgccccgcgtggtcatccctcatgatgaggatctgaagtaccgcatcctctatgaggcacatgacgcgccgctggccggtcatcttggccgtgagaagacctacagctcggtgagcacccgctactggtggccgaagctgtactagtggacgagcacttatgtgcgcgcgtgcgagacgtgtcagcgcgtgaagtcgtcacctcatgctgcagccccgttggcgagtttgtctgtcccttcgggctgtaggcaatccatgagtatggactttgtgtttggcctgccggtggacgcactggagtcgtggtcttcgtggaccgacggagcaagatggctcacattgcggctgtgccggatacgatcgatggtaagggtacaacgacgctgttcttggaccgagtgtttcgacaacacggactccctgagtcgattgtctcggaccgagacccacgcttcacgggcaacttctggaacgcggtctttgcggtgcttggcaccaagctggacatgcccacggtggaccatccgcagaccgatggtcagacagagcgcgtgaatcgcgttgtcgaggacgtgtaatgggcctaccttggctcactgctacggcttacacgtatgcgcacgtgtacgaggaagcgtaggtttcttttacttgagttaagtatactcgagatccacgagtatactttaaacaagataaagactccaagtagcgtgttttggtaaaagatgagaactgctatttttgttttatgtttctgacttcctctaaatgtaatattctaaactaggaatctgccaacggctggagggcagaattccaatgctatgcatgtcactcattggctaaaagatgctgctctcaaccaataggaatcctaagtctctatggaccacccgtcgtggtgatcctaaatgtatgtagcctttggtgtgtctacaccaaggtcgagaaagtctttcgaacctctaacagacgtcgtttctgttagagttacaagtggctgtagccacttgtgcgtgtaaccccgttacaggacgtgctccgcagcatttgcgccaagacgccgaagcgctggagcgccatgctgccactcgctgagtttgcgttgaacaacgccgtgcacgcctcgacaggctacacgccgttctacgtgaacagcttgtctcatccccgcgtcccgctgacgccgccacgtcgtggcctcgggcttggtgggggaggagaagccgatttagctgatcggctagccaatgtcagcccggctactgttcgtaaacaggttgacgctttcttgtcgacgcgtctttcgacatgtgcgtgacgcaatggctgagagccaagacaagcaaaaggaacatgcagatgccaggggcagaggcaatgttgacagttatgaggtcggggacctggtgttgcttaatgctaagaacctacctacacatgcagtgtcagccgtcttcaagacgaagttgcgcccacgcttcgtcggacctttcaaggttgtggccaagaagggccttgcgtacacgctcaatcttccgaagaagatgcggacgcaccccgtcttctacgtgggcttgctcaagccgtaccaggacccgatgcaggtgccgatggaggcaccgagggtagcgaggtcacaggcgcggaggccgcggtcgtcgaggacgcagtcgcaggcgtcgaggacgcggtcatccacgtgggcaccgcaggcacaggcggaagaatcggcgccggaggtgccgcgggcacagcgagagccgcatgcgcaggaggctcagcagtcggagcctgcatgcgggccaggaggtcgagctgtccctgaagcacagcctgctgacgctatagctccccgagctcccggccacgttgctcatcgcgatcgcgatagtatcgcacccagtcttccagggccccaaggcggtcccagaccgctcgaggcacctcgatccatcgcgtccgctcggcgagctcgtcgagttcggtggcagtccggcccagacgcgcatcaacgtcatggatatgatccccatggcgacccgcctgctgccgcgcctccaagagctcaccttgagtcgcaaagggccccacagcggcctccaccggctctgctcgatgagcacgggaatctacattaccatgtggagcgcctcctggcgaagcggcggtgccggggtcaaaaccagtatctggtgaaatggcgaggataccctcactccgagagctcatggtgcccctccgccaagactgcccagacgtcgtggacgcttttgatcagcttgatcaccagcgccccgagggctcaaggccggcacgccggccgtcccgcgcttcccggcaataagctggggagctgctgggtcagccacattgttccaaggctgaccctgagccacagcgctcactccctcgcgggaaggagcggctggagtgctcgaaggagcgaagcgcgcagcgctaaactggatctgcggctgggcgagtgccgtgaggctgcgctcggctcggaccttcgcgaaatcgaagcggagcttgcgttcaatgcgaacatccacttcactgaagctagctcggagagcgtccatggagctgagctttcggctgtgctcggcccaagactcgaactgagcttcgtactcaattgagtcttccctcgggctaagtaccaccgggtacgtccgcatggcgggcacggacttctgttgggcttgcagccgcagcctctcgcgatactccgcgacagtcgtagactgtggagtgaggagccgctctcgcagagacgtacgcagtgcgagctcctccggagtacgggccgcgggcccaatggcgtgcagcgcgagagactgctggaacgcctggcgacaaccctccgcggggtcgcgacgccggaagccgtagtcggctgtgctggggttcagcagaggccacagcacggggcgctgggagcgcatgggagccatctgcgccgcaacctgctcggactgagcttcgcccagagggttggagatgacggggcccagggacacgccctcaccacgaggtggcgaataccgtgactcagtgagcgcgcgcagctcgtagaggccggaagagcgttcagggaacgggttcggagctcgcagcggtggtcgcggctcctccctcgacggcgcagcgcgctctgcaggtggacggctcggcgagcgcacaggagacgtgtgcgcgggacgctcttgatcgcgacggctcggagagccaactggggccggcgggccttcttcatggcgtgtcaacggtgtgggcgaagcgccgccgcggctcggggagcgtcgcgtgagtggggacgcatctcctcggttcggagaaccctccatggactcgcccgcctcgccctcttcaccaaagagttccctaggatccatgatatggtgggttggtgctcgaggagagctggggcttgcgcgctgcgagctgcgcttcaggcgttgcgccgcgaagtactcggacaccgagagcctgaaaggcgtcgagggtgtgcgcgcgggcgctggcgttcgcggaggtgcggaggcacgcagtgcagcagcacgagaggagcgaggctccgaggcggatctcgcgagaggctgtctgcggtggaaagaccaaaaggctttatgacttgaagtcatgtgagggcacgttgcgccgagaagttctcagagaagttcacgcgatgtggattgactcgttcgagaaggaggcttgacggaacaagacccggaggttgaccgttaagcgtgaacacccgtgtccacggtttggtgggggagggtgtaacggggttacacgagagttacccgaagggttatgaagtgggtacacatttgtctagcctaaatcagtaggagaatcagtacacggcttcagagccactgattatgtatatgactagggttcactatgctagatagtgaaccggatacatttacaccgtaggcggcttggccgcgataaagggaaatacattcagtttgagattcacacagttaagagttaagggttgactcttggagtccgtaaggtgtacggactcgtacgttctggtattagaacgggatatcctaaagctcagaatctgtgagtctgttaagcttccaccgacgcaaagctacggcagccccgctgcactgtagccacttgtgcgtgtaaccctgttacaccgcgtgctcaactatcgcactcgtgttgtcaatcttggtcgcaaatactgagtaagtattacttctctaggtcgttagttaggctaaatgactgaaatgtacatcaactcaaaacacaaaaaacacaaaaaagtttactagtattgcgcagcagtttcgacgcgtgacatctgagcgtcttagttcgtttgcgtattgtaaatcgtgtcatggatagggttgatgtagaggcttgcaccgtcgcactattaggcgccacgcgcccagatcagcgactaagcacactacaggtcgatgcggtactgtgatcagcgcggcctgacttggtgatcaatgcgagctccaggactcgctggcaatgatgacgggtggcgtgcttagaaggcagcacgagcacgatatgtagaggcttactagcacgacattgcgttgctttctgctttcgcgattgaaggtgcaagttgaagtgggtatgccacgcgaaagtcacgagaatgtcaatgacacccgcgcctgggccgcataacgacagttcttcgaactgcgaatactattgcgataatattgggataggaagcaacgttaactaggattacagacaacgacggataaatacggcaacgcaaaacccggcacacatatgttgtactttttacaataagtaattcagatagccaatcagcttcgagagttacacttgacatttgtattccatatggtttttaagtactttctctaaatttgtgtgtactttatgctccgttacgtgtattttatgtcattgccttgtacaatctcgatcgttcccgacagaaaattctggcacatttactatggaggatgtcattcagctatgccggatttatccgtcgttgtctgtatatccgtgctacatcaagtcaaacgatgacttctcttgacatctaactggtatattttcttgaaaccggtacgactctggtgcctccaaaaggtttatatgcgtgggcagatcgcaccggtaggatgtttatatgtgtgaaccggtgcgctatcgacaacgctggtatgaatcggtatatgtattgagctggacgtgtgaacgatgaagttaatactaaggtaagcgtttgtatttctaaaagctccaaacagatctaaaaaaacaaggttcgcattttaatgtgcaaagcattgccggtagataggttaaactggcaaaattccgggcaggtgctgcggctgcgaagtaggcgcaggagatgaccgtagctaataagaaaaatataataataaataaaaagaaggggtttgcaccaaaattctcctatcccatagtttggatagtagtagtaatatcactactagccaaaaccccactactacaaacccacgaatttcgtcccaatgacaataattgtaaataggtttattcatagcaatttttatgacaatacaagtatttttataagaatacgtatttataatggattttcttgtcggctggatctgcatagcgaggacgttaggatgctaagatacggcgacgcgactgtagttgtaatgaatctcatggtctcctcacaaatcaaccctggaagttcgatgaagcaaaccttcagccccaagcctgctcagggcatccttcatctcctcgtggtagttccaggacttcacgttagagacgcactgccaccagtgttagctgaatgcaatgcacaaggtttctggaaccatctcaatcatgttctgaagaagacccacttgaatatccccgtcgattttcgggatatcgattggaacaacatccgagacgtctacacactgaaagctggccaaacgtctgcgcgctttgtcgatataatagaagaatcggttcgagtcgtggcggagtcgcttggtaatgtgatgaaagtgctgtctacagtgactacggtgcaagaaatctcttggctggtgctgacgctaatggaaagtgtgaaagacgcggcagccgctgaccttcaggtgcgaagtggctgcagcattgagagcaaggacgacaggatttgtgcacacggcaaagcggacttgctcttgcaaaatggcagaaattatgtgggtctggtggcaatcactacctgcactacgtcagaagatgaaatggcaaaagtgattgtgggaatggagatggcgaacacattcagcaagggcgagctcacaacaggtatcctgactgacttccgctcctggactttccttaggcttcaatacccaaatgatcgtgaaggtaaagtcgttgtgacgttccagacagtgaagcttttggagcctgaagaccagttcccgaaagaggacaacttgaggtgtgtggttggcaagcttttgagtgtcctgaagaaaggatctcgataatgcatcgaagtacatgcttttgttgcttagactgtttgttggctgctctcgttagaggggtgagtaatttcgtgaagccgatttcgtcgactacctcatgaccagcttcgtcgcgtttactgggaaagttttctcggtgacaccttaggacggtattatttttaatacgtgagacgaacgactgccctatgtatgatggttgaacacgatgcccctcaccattttgccatattgaacaactccatccccacaaacccctacgccaatcccgtcttcaattccccttcgtactggaacaaatctgacaattcttcggacgtggggtcagctgcaagtgcgtgttgaactgccgcgggagattgcatcagacaaacgtcgtgtgagtcgctgctgaggacgaagtcgagctggccaccaacgttcaatctgccgtctgggttttcaatgtatcggttgccgcttattttcacgctcaaattctcggacgaaacaatagccagcaagagagaaaatatggcccacgacatctcctcgttcgtttctgctcctttcagtaagtccaaagatttggtcaactttgctttcacttgctccaagcagtcgtcacgtactgggcgagaagtctcgtggtaggtgtcgagatcgtacttgctcttgatatcgtgccatttcacccagttaagcgcaacgggtttgcccttagcaggccttaaagtcctcagaatacaaccgaagtcgttccagtaccgttggatacggtacttagacagcacaccaggcaaagccttgcgcagagggagatgtggtaccacaaccaacacgtgagtacagcctcggggaggttccagaccgaaaacctggtcaacacgctcttctaagtggagttcctgcgagtgtatcaactccatcatgtccttcgtcacgtctcctagatccagcataatagcatcgtcgcttttgattttcagccatgaaccacgcagctttgccagcaccaacctaatggtgctgtggtctttcacgcgggcatcacgttgcagtagattgcgcagtttgctcatgtcagcatctcgctcaatgctaacgcgcagtgcgtcgccagaaaatccaacgaagctgcacgcgagttccgtaggggggccaccaccaagtgcacggtattccacggcatcacaaacgggaagaggtcctcgaatgtcttctcagaatcaatttccttcgtcagcaagctctcgatccgagtcgtatctcctttcttcagggcgacaatgacgttgagagccacatgtgcgcttgcatcgcggggaagagcttgagctaccttctgcagctgagacaaccttgtttggatcttcatcttcacatcctctgcaactgaattcgtctcgatgtcggcgtagagaagagtgtacggcgaacacgccatcacgaacaccacgcgcattttatcggtctttggtcctaaactcgtcggacaacaggaaatagcaaaatatattccaggggagagagatgttagaatgatgtgttgcgacagcgccattgagtgtgactcccatcaaactagctacaacgatgctaatagtagtgccaaagtttttgggagacagatgtacatgatgatcgagctcgtttgaattatttattagcacaactgtaacaacacacaaacgtacggtgataaccaaagtaatcaaagcccgtaccaatacgaacttcgaagcccacttgctagcctgttggccaactgttccacctgctcggcatgtccattcttgatggctttctcgaatatttcactcatcgtctccttgggaatacgctcctcgccacacagtgctgccatacctctcgagctccacttggcaccggcaaatttctcgacaatcaattcagttggaatgtgctttgtggcacagaaacttcaagacagggattctgttctcctcgctcacgtaataatcgtgatgccatccttcttgggctgcattgtgaaatgcagcaacgacagacgcagctggaaagctttcgtgttcatacaggaatatggaaacagcgacgcagccagcacgttcaaaggcacgccagaccgacgcggctgctgcgcgctctttactgtagagcagtaccacaactcgggtagatccttcgtgcgcagctgtctccaatcctttatcgaacgcgctcgaagctactcgccccgtattcaacaagagctcgagtacgccaatctcatcatttcctacggctgcgccaaaggctttgccgatcatctcgggatcgttgtgtccttggttgtacaaatacctcacactccgtttgtagcccatttctgccagttcaacgaacatccgctccatggtcaccgagttgttcttcatataggtctcgataattggcgctacagcagtgagcaaccccgtatcgatcgctagctccagtgccttcctgaggtcccaaattttgtacgcctcatacaacaggaagttcactatagcagtgtgtccaccttgaatggcaaggtacagcgcctcacttgaaatatcctccggttcctcgtagtacccatactgcgttatatcgcgtgcaacttctgcaacgtcaaggtggcctctttctgcggcgatgtcgaggacagatcacgcaactccgcaacgaggatcggaccacccgaactctggtaacacatgacgaaccacctccgagtgtccaaggcgggcagcagttgtagccatctcatgcagcacctcaaatgtctcgccatcgtcgtcgtcgctctcaacgtcgcaacacaagggcaacaaattctccacagccgctgcgttgccatctccggctgcgaggatcgcagcactgtgaagagtgtagccatatctcttcagcagctcgtttagccactgcatgtccttccgtctcgccgcctccgcgatggcctccatcggctgcatcaacaaggtgtccagggtctccatagcgtgcgggagggcgcaaatttcaaccggaaagcgggcgttctccagtcgagcatactggtccggacactcaacccatcttcttgccagcgcgcagttgttctcttcaatttcgaagtgacaatggctacactttggctcaggcggggaccaatcagagcgcagttagctaatctggaacttcccgccagttccagacggatacttacccaaagttccagacgacacttacccaggtcatctttataacatagccggaacgcatttaaacaccatctctacacaacatttgactggcggcgcgccagccattgccaaacgccattcgccgagtgagtgtgtgagttgatcgatcgatgggcatgaacgcgacggacgccgaggcccccgagggcgccgtcaagtaccgcctcgtggaggccgaggaggtgagcgacaagccgcagcaggctccggcgtcgtcgtcggccgcgcgcgccgccaagcccaagcgcaagggcaagctcaactggtcgcagttccccatggagggcgaggacgccgaggccgcggacgcgtcggcgccgcagacggacgcgccgacgtccacccgaggtggacactacggacgtggacgcggaccgcgcaacggcaacggaggacgcttcggaggacgccgccagaacggagacaacaacggcgcgtactacaacggcgtgtacgtgcccacgcccgacgtcaaggtgacggcgcagtgggccaagaaccaaatgtgcgtatatgtactcaatttctctaaacgtttgcgcccattttctctaaccggttagagaaaatgggtctcgtttaggctagtgctaaccgatgtatatgttgcttgctgctgatgttgcagtgagttctactttacgtcggacaacctggtgcgcgacattttcctgcgccagcacatggacgtggacggcttcgtgccgctggccttcgtgggcagcttccaggccgtgtactcggtgcaccaggactacgcgtcgctgctggaggccgtcaagcagtcggagacgctggagctggacgagcagaacgagaagatccggctgcgcgagggctggcagaagtgggtctggcccaacgccgagggcggctacggcgtgccgcggtacattaaggtggctgacaaggacgcggccgagcaatagacaggtggacaaccggtggacagacagacaggagggggctgacgtggcggcgctgagttgcatatttgcctattgcctcccacgcaggtcgtcgacgagcgaggaataccgacagaaaaagtagactacgattcatagagcacacaagcttcaccaggagaaaaaggaaacaaacatgtcagaaaaaataaactcgagaaaaaccacgcgcccgtgtggcattgctgtgatgaatgtgccaaggtcgaaaaagatggcatcacatattagcgaatcgtctcgacactgacaggtgtggtaaggtgttccggtggtacagtacgtacaaaaggatcaaggttgaatctacaaaagccacggaacgagtggcgagtgaagtgatgcccggaattctgttgaagtgtttgtcaacttgtcaattgctacagccggtatttagtgtcatcgaccacttcagctcaactacggtttctcattgggcgaaaaatcgaggtgtaggctttgaggagcaatccacacaggaccgctgtcgtatccttcacgatgatatattattgtgctcaatgagacttcggtagccatcctgtagatcctgttttacgagactagctcaacctactgaccactacttaggctgccgaatcggaaggtgaagtcgacccctgcatcgaacacatacatacacagacgagcaatacgatgaaaatcaggagcaacacaccaacatcaacggactggaaatcgtaccaaaatgaaccacccgaaagcaaagagtgacaaccatccacgccattaatttgccctgaatgagcgacacttgagtcttcatcgcttgaccattgcaaccaacagcacgaatgatgcaatttggagcaagccaaagatgaacaggaaaaggatctttgagcctacattctccattgtaaccccagccatttcggcgtgatatcgggcactgggcagatgaaccatcaccaagacgtagcaacaatacaatactggtgttgcagcctccaaatacgccgtgacgaccagacactccatagaaaatagagcctcaagattttcttgcaatatcatcctgtgtgttgtggaagattgcgttctctttgacacgtcaaaactttccgaacttggtgggggcagagctcgcttcatagcactggcaacaatcggctgaatggcttctactcgatttcttgcccaaggtaggtggcgtttaggataagcggaggcaactggagcaaaggaaggtcccgaactagaagcatacgacattcttctgctcgaaatgccgtgtgaataggagattttggccagcttttccaagagatctttactctctcgggatacttcgtgagggaggcatgaatatactcgaatacccggacgaagctgtctctcaaacttttctggatctcggcatagcgagctaagggcagccagcaaactgtcgccagtccgggctgcatctgtttcgataccaatgtgctgatgaagcctcgataaaagtgttccagttcgcttgtgcagcccgtacaacataacggcggtttggaatagatcggtcccagtgatggcaacggcgctaacgagagatgacgcgttctgcatgcacgttgacacgtacactgcgttgaagaaatccaccgtaaagatgactgcctctggcgccatatcttccatgtgcactgcgcaccgtagcacgacatttttcagagcagttttgatcacgggtaggagaaaaataacaggaagctgatactcggtcccttgggcgaggcgaaacaacgtctcgtaggctggatacgtcacggccataagattctgagctaccaggaagcggatgtactgcattagctgcttccggcttgacgtaacgtggtggaaaatctgccctccaagaactatacgaaacgagagcgtatatatcacgtagaataacggagctagactcaacacgaagaacggcaccggaaagatgaggtgcatcgatatgagcgcggcaactaatgtgatggcagccgatgaacaaatgcacagcaaagcctctcaagcccagccaatgttcacgccatcaataaaatactgcgactggtccacgacaacgcgagcgatcacgatcgcgagaatcgccgctcgaatacagaatccgtagttttcctgccatcctttcgctggatcttgaagcggtatggattcctgaactaggaccagcgcaacggtaggcatcggagtgccaatgcacacaagaaatacgcggaataggggcgtgtttctggtgtattcttcgagagcgagtagccgatggattgagtagctgcccccgtagtaagttacttgaagttgtttccaaacacggaaaagttttacgagccaggtgcaccgacaggattttcgagaacgtgacgaggctttgggagcttcattcagatgcacagaagtcgctgccaccatcgtgatgactgtcgctttcagtggccaagctggtgctggtccaaaagaaacataacttcaccgttgagtagtcaagaaaactattctcctcgcggctactacaactgatctaatagtagcattccgtaagaatattttgcagttattctgatacctggagattggcgtacaagaaacagttttacaaccgtgaagacggatgaaaatcgtttatgctggtagagggtgatgacaacaagacagcgaacatcctgaaatctagatattatctgtcagttttgcctgctggctaagttatcgcgaataatctggcgtattccatcgtggccagctagcctaagtgcatactgcaacttgtacgtgggccagtagcgacgtggcttcaccaagagcacgacgatatcctcccggccttcgcgcactgctgtcaacaatgcctcgtttttcgctacgcttggtacacaaggaatatcgaccagcgttccgataatgtttttgtcactcgctcgcccagcagacgcaaacagatcatgaatcgcactccaagaccaacgatgcttggtatataataggtccacaacactgtgttggcgtttgggcgctgcatgtcgtaataacctcttaagcgtcgcggaagaaatactcttttgaccgacgatgaagtcgatagcgtgggcactaccgttcgaagcagcactcgtcaacgcctccgttgtcacgtccacagagatacacggtttcttccacagctgcttcgcaagaccaacgtcgtccctctccgcagcatagataaatgctcgaatgatgacgctcggagaagcagcttcttcggtgcacaacagctccaacacgcttgaattgttgcaagcgatagcgatctcgacactcgcgtttaccatgttggcttgcacacactccatcttcaaaagatatttcacaatttcaacgctttcacgacagccattgttttccactgctgtaataaagaggttgtcgatgcactcggtaggaatggctgtgtttaagtataaaaaattgacgatagcagctttacctgcctcctcgaaggctctcgcaatgcagcctggagacagttgcgtcttacgaaagagaaatcgcacggcactgaacttcccatattgcgaggcttgctcgaatgctaactcaaaagcttttctgcgaacccgcccagtatccaataacacttccaacgcacgaatgcgttggtacttcgccgcatcaacaaaagcagcaccaacaaacgccacagcgtcatgaccgtggtcgtacaaatagcgaacacttgcagcataccctctcctggccataagaaccaagagatcgtcgttcgtccccaactcatgaaaagttgggagaagatcctgcatcagctcaatgatgtgtttgttcccatcgcatacggcaagttcaaatgctttggcggcgtcccaattcaacttccccggcgtaagtaaaacccgaatcacgtcgccataaccccccgcaatagctctgtttagagccgtactccgctgcgaagccatcagacaggttggatacggtcctgccagttcgtcagcgtgtttcatcacgaacttaaccacctcgacatgccccttctcagcggcaacatccataactctccacgcaattcgacttcgcttaaaactcgactcaacattgagcagcaccatttccaccacatccagacgcccatgtttcccagcagcgactgccgcctccgtggtcctgtccacctcggactccgccagcagcaccaccaaagttgccgtttgccctctctctgccgcggtaacaattgcgtccgacaagtcgaaagggaaatgctctctagataggaataactcttgcaacttctgcacttcccccgactccgccaactcggaggcagcctcctctggtgtcatcagcatccagttgagcagctcaatcacatgaggcagcgcagcgaccgtcggagggagactgttccgcagccagaccttgcgggtcgcgatggggacgcggtgtccgaagtaggtcacatagcgggctcgcttggtcgtggaggtgtcgtcgctgccgcagactcgcttgtgcatggactctttggactttgccatgttcccatagagttgtaccggtaccaaatttatggtacacttaccttcgagtagtttttatcaacttcgactgaggaaaggaacttgaagacgcagctctgctaaaacgttgtgactcgattcagataacctttttgctgcatacgtccttcaaggcctcggctgtccctaaactttctgcggcctcgatagctctttcatagtaatccgacgacactttacctgtctcccacagaaagctggcggtctcaatatcagcgactgcactcacgaacgcttcccccaccaggtcggagtcatcgtgccctgcttggtacaaatacttcacggcctcaggcgtccccgtgcgagccaatcgcacgagcatgtcctctcctccaacctcttcctcgcagtagtcttcatagatcatctcagcaatttggggctgttcgctcagcagtgcttcatcgaaagcgccatcgacatcccagtggtattgcttagagcccagaagacacgccaccacgccagcatgtccgcccgaaattgcactcgacagcgccgaactccgctcgcttgcttgacgatactcgtcctcctttgcgtagctagatacaaaatccacgatatcagcatgtccacccgctgcggcttcatccagaatctcccacgccgcgtcaaccttgttgatctcaacatcctgctcgtagccgtagtacacgaacttgccgcggtgctcccgctcctgggcaatctccctgagcaacatctgcacaacgtcgaggtggccgttcctggcagcatccatcgcagcctccatcgcagcctccttcaggcaagcgacaacacagtcgtccagaatgaactccccgtcccccattacgttgggtagcaacgtgtccaccgcctcaactcggcctttagctgcggcatactgcatcacttgggacgcattgcagtcggatctgtcgagtagaatctccagcaatggggagtcgtccagcctcatggtttccatcgcagcctcctccggtgccattgctagtgcgttgatgaggttgagcacatgtggcagtcctaggatttccatagggaaatgcgggtcggcggcgcctcttgcgttgacttgactctgagctgcgtcgcgtcgttcatgaatgactgcgttcctggcacgctttgccttgggggaagcgtgggtggtgtctactagctcttctcgctgcgcccgcatcctggattgagtggtgattgcaatccctgcgttttggcgggaaagtggctcaagatttggtgcagtttgtatacacttcgtagtatacactagtacgtgtagttgtggttcacgacccagtgcacgtacgaaggcaccgcgttgcctggggctcgtggacctctcggtgtcactccatgtagtagtacactaacgaccaggctccgtggaaagatgccaaggactcacgtgaaaaaatagtctcttgataattattttgcgctttcggcgcgcaaaccatgccaatgtctacttcacgcatgccaaaacggctcttgaacgataaattcggacaagcagaaaccttgactggccatgctctgttactagactctcctagttcgtgtcgcgtccgatccgcccagtcaggaattgttgcagcttctgatttgtcgtcgcgttcagtgcttcggtcagcgattcgagtggtaaatttccgcgccattccatgtacttgacagctttcactctgtcgttcctcgccgcgagcatgaacgcttcgatcttcacgtcacgagaggcttctggcttgtccaaaagaaattcaactgcgtcagtgtatcctcggcgagcggcgttgagaagagctttgcggaccactgcttcaggaatatgcccttcgtcgtacagaaattctcgcaaatgcgagttgcgcccagagttgaacacccgcataaaggcgctctgcagcagttcaggagaaatcaagtcttttttcaccaaaacctccataatgtcttgggatcctttcgtgaatgcactctcaaacgccttgatggccgcaccaggcgacagacgatggtcatcaactagaatctcgaccactcgagactggttgtcgttcacagctgatagaagtgcctcgttaatcacgccggatgacaggcaagactgctcgatcaggaatttcaccacgtcagcgcacctgccttcggaagctccattgtggcaagcgacacgaaaagaagtgccaatcgactccgcgcgaatcttgtcggtctgcagaagacacttgagcccggtgacggtattgtgcgtactatccttgaacgccttgttcagtatatcggccgagatgcttctcttgttgagcagactcttcatgaattcaacaaatccacaacaggctgcgctctcaaaatccttttcgaactgttctgacgaaactttcccagtctcccacaaaaagtcggtaatcccgatattccctgaggcacataggaacgcttttcctaccaggtcgaggtcatcgtggcccgcgtgatacaggtacttgagtgcgtcagtcatccctgtgcgggccatccgaaggaaaatgttatcgacggggtactccgggtggtacgcgttgtatatcacgttggccacctcaaagtgtccggccttcgcagcctgatcaacggcatcaaggacattccaacgatacccacgactaaccagatacgccacaatatcagtgtgaccgcgagaaatggcgctgaagagacccgaactcgtgacactcccgggaggactgccatagtcgttgtcatcgtgtgcgtaacgagctgcaaatttcacaatatctgcatacccgtctgctgcggccgcgtccaggatactccacgcacaacggttcttgtgcgcgatgatttcttgctgagaaaagtacccaacggccctgtattctcgttgctgtacaatctccttcagcaatacttgcaccacttcgaagtgcccgttgctggcagcagtcaccgctgcgttcttcaagtcttcgataacgtagaaattcagtgtgaactcccccgtgcccattattttgggtagcatcgctcttacagcgccaactcgaccgctagatgcggcatatcgaaagacttcagtggcgtcgcagtcggacctctccagtatacgtgaagtcgttcgctttgattgctgcctccgccgcctccagtggggtcatcgctgctagcatgttgatggagctgagaacatggggcagcgctagaatcgcgccaggaaaaagggcgccccgcaggtgttggtactggggatcaacactcccctcacttggacttgactctggagtggatcgccagcacagctgcgtgcagccttggcatgtcttggctgagaggaaggttgggagcggtctgctcgcttcccgggtcgcgtcgtcactggcatttctgctgcaaaaagctcccgcttcgtgtgttcccactcacgtggagagaaagaatgactgcagaaaatgctacttcaacttggaaaaggccgcaattgtgtctaaaaactgacactctggaccattcctctggacgtaagctggtaaaaaggtgcctggctgccacaagtcggtcgcttcaagattgcagctagacacatgagatcgagttcgtttatcagcttgggtggatgagggcctacgctaaagtttatgtcagatagaatgcatcacgcaggattcaagaggttttatcaatcgtgcacttggagactagaatacgcatccttgtcggcttggtatttttggaagtttccgtcgctaaaaaaccacctttgggcagcaccaaggaacggagaacgcatttgttaaaggtggagaccatgaagcgcagccgtggcagtgacaacgagcccccacgagccatgagtgcagctggtgagctggaaattgctgccgactacccctacaagaaactcaaagacgcgcgatttcctgtagcaattgcgagtctgcatcccgtacttgacgcgatcaacgagtgggccaagacacccgaggaggcaattctggaagccgtgcaaggcagcaagagatgtgaaggaaagatttggctatggagcagtggggaaggccatggcactagctgccgaggctggtctgctggacatcgtcaagtttttcctggaaaacgctggtcactacagcgaagaagaggaggagggggaggaggaaacggatgaagaggcgggtgaaaatgaagacgaagacgagtgtgacaagtacttgacctgggaagcgaggagagatgctgctgttgttgctgcaggcagcggtcatctcgatatcgtggaatacatatttccggaaattgtttggcgcgaatacgattcagatgatgaagccggagaccgccagttctaccaagggagaatctaccgagcaacgtggagtgtgctggaagctggagctgagaatgaccaccttgaagtcgtcgaattctccgtgaatcacgcaaaagatcgagattattggcattggtacaaccccaccatgagaaaattatgtgctttggcgcgtgcaagcgctaaaggccacaccgacgtcgtgattttcttgctcagcgatagggaaaattgctggaacatcgctagagcatttgagaaagcagcagtacctggcaacgagcttctggccaatatactttacgatgtgtactcacgccgggagaaacacgacttgttcgtccgaatggcgatggctggaagtactagcgccgtggagtatcttcacaagaaacatccagtagaatcagcatcgttagaagctgggtttctcgctgcagtgacccatgaatggatcgatattatcgagtttctactgtcgacagacgaagtttcagccgggctatttgacaaagcctttgtgctggcctcaagcaggggaaaactcaaatctgtcacgttgctgtatggaaagaagcgcgcttcgccgatatccatcatcgacgcccttgagaccgcgggcagtcttgctgtgatcaagtttttgtattcaaatgaagatgtctccgtcagttccattgccgcagcttttacaaacgctttaagatacggacctaccagggaaacgatcaaatcgttctctagcgagctcagcgaagaaagcacacggattgtgtgctacttgtacgcaatgaactgtattccaccggaggcagtcagtgacgcgtttcaatgggtggttttcaaaattcccgtcgatgatgcaacagccatgtacacagagcacagcatcagttctgcagctattgggactgcttttgagagagcggtcacggagagacgaggtctggcactcgtaaagtttcttattgaccaaggctcagtctaacaaaagtttctggatcaagcatttctgatggcagctcgatgcggccgaaagcgagctctgctacttctgtacagcagcttagattgtccagcgaacgtactgacggaagcactgcataacacacgaaaccgcaagatcaagaaaacactgcagcttgagctcgagcggcagttcggcttccacggaagcaagctagccaactagcacccaactctaacaaaactatacaaaacatatctacacggtgcatgaaatctacgacgctgttacttagtaaaaccattgcaattatttaccataatagttagtcccatttctgacgtgcagccatggtccatgtagtggccgcatagttacgacagacgtgatgacgaaatgtttgttggatcacacgggttttctttttcctgcttcagattacggccagttgcatcctaatgtagggggggaagagggtcatgtacgataaagatcaacttggaagctatgccatttttttctgcaagcgacaacatacagtagtcaaagcatacacacctgcattttgtcgtatacaggtacacgcacgtgaactacttgcagtcgcgttgcctgcctcattcctggtcatcagtcttgtcgttactactcgtgtgcgtaccataacgccatcagacttaccgcttcaacactcaacagtttgcggccatgttgtctgcagccagttgccctgttttggaaagaaactaacggcgaacgtgattacaggcatcacgcttaccgttattgtcgtttaatcgcctatcatggcgtttgtcctgcaacttgctcaatcagcacgtggctcgggcgatggttactgtattacgctgtttgcgctgtttgcgctcgcatagcgcagccagcttgtccggctttgcctcttgaacactcgtcgcatcagttctcagtttgccaagaccaccacattcgccccctcaaatcaagtgaccaagaaatgaagctcgcggcctccttcgcccttcttctcgttgcgatggctgcgatgcctaccgattcggcaaggtcctgtcgcggcgaagacgcctgcgacagcctctacctcagcgatacagcaaaattcgataaaatcagcaagtgctgcgacacgaacgagtacgcttctgaccaggctgtaagggactgttgccggcagagctgcgtctacaacagtccctgtaggttttagtcagcgtgccgttagtggcttcggtggcatgcaccattacgtcggtgaaggcatacgggagtcagatttactagaccatcgagcttcacgaaactggcatacataaggacacaacttcgcatgaacattgacatctttttgagcttgtacaattgcacactagtttgttgcgttttgttgtcgtttactgacttgcgtctctgaattgtgttaccgacagccttcgaagcacaaacttcgattatatccccccataaaggtggcccgttgcgatttaatgcgtatgtggtaggcgtgcatacaccatgacgacttccatggtgataagctgacttcttctccactggctcggtcgctttcaatacggacgccacactttggtacggctgcgttaagctactgcagctttcatttggagtcacagtatacctcggtgctgttaaaatcatcacgttcaggtcttcaattgccagcgaatgaaaaatagtttgcagtgtttgcgtcgggaaaagcgctttgctacggatctccttctctgtcacccgctgctggatctcctcaaacgcactgacgtcttccgagaacctcggtagccaccgcccgcccgcatccttagcttcaaacaggaaaatgctcgtttcgaggacttcattgtcgtcgcagaatgccactttcttgatcagcgccttcgatcggtcgataatcacggggaagctggacgtgctggaagcaccgaccactctgcaccaaagcaccacaaactcgatgggcagggcgtcgtccaacgagcgagcgcgcttgctcagtatcccaggcataacgacccggacaagaagatgcacatctctgctccccgcgcccttaaagtggcgtttaactggatgatgcagagggatttctttccgacaaacggatttaaccattggcttagatcctgtcattaacgcggttgcttcaggtccattctggggaaaccagtcaccgcgctcggtcttggccaagtacagacaaaccatcgagtagtcaatcccggcgaagaatgtcgggttttcagcgtcgatggcctccagtaagtcccacacaatctccgtcggcttcatcaggatggtctggggttcctggcgggctccaatcagtaaaacccatagctctctgcttgtttctttctccgcttgtgatacaccggggtgcggatgaacaagttcccccagttctggctccatggcccgcacgataaggtgagggacgttaggtcccgtcgctccaaagaggtgtcccaccgatttatcgaggcaaagctccgtcttgcaaattatctcaaacgcaattctccaatccgcggcttagaaatccacccatctcgatccattcaccgttgtctagtcgggctggatacagtctgaactcggcgttttcgcgctctgcgaagactgccgggaaggatatcttaagagcactcgccaggtctgcgctagctgccacacgtaagctcatcagccttctcccaacgagcagccaccacagtgtgaactccgccatgctgccaattgctcgaaatggacaatgactggtgtagttttgttcattgattgatatattcagattcgtacattttggtttagaattttggtgagcggccacgattttgatttggtctgcgataggagcaataacgttacttcctatcccagtataaagtcaaagctgaataattggaattgcgttcagatgttgcatgctttccgttcagcaatagctgaaaacgactcggatcgacggatgccaacgtccattcgctccattaaatcgaacgccattaaaggaagaactctgtaagacacaaaaacatcgagttctccaaagccgtgaacggagtaaggtagggccacaagcacccaaactaccgactcgattctacaaaacgattttgtgaatccactggatgcagtgccagctctctttgtcgcgagtcactttgtcggaccggtttggggcgggccgccgctgtataggagtagtaagtgctgcctgtgcttataggtttatggggcacaaatagcaaggaggtcactaagcaaaatgcaataagtgctccatacgacctgtgtggtccttttaagcaaaattcacgactgaccttccttctactcctaactcttcctctctacctctgcagatccttgcgtttcagcgccttcgggtgactccgttcccgctcacccctcccaaagacttgatccgttcaccttgacggccctcaaagccgcctaacatgccatccgtccccgaagtcccgccacgacacggcgaaacacatcatccctccgagatacctccgggtagcggcccacgggtctccaccttagagacaacccggcccacggcccacaactcctcgtccgcagccacagcaggtggacgacctcaggcactcatcgtcgcccacacagagttggaacggtccgagccgctccgactcgggacatcctccccgactgcatctcggcgtcctcgccgagcgcacgcagcttgatccacttctctccttgcttgcaagaccctccgttcggcctgcaatccacttcgcgtccgcacctgcactctcggcgcattgcccccgccgtccatcctccagaatgcctcacttagacgctcagcctgctcctgctcctcgagagccgcgcaccacgcagcgtagccctccgtggccatagtcagtggcgaatgctcgcctgccgacgcctcgtagagcctccacaacttgctggttatgcataccagcgcaacccaaacgttcaccacaagcaaccagtagttagtcactattgcctgctcgccctcctcggaggcgaaccagcaatcgaagaccacgacttcggcgaacacgctggccacgccctggcagacccactcgacgacttcgtagatgaacagcacggcgtagaacgccgagaacatgatcagggacgtcagcgtccacaccaccttggcgacaagcttggcacgggcgaccgaacggccagactccagactcgcgcccgtgcagtacttggagcacgccttccgtcccgacgcctaagtctctggcaagaagacgcaccaccattcgtggagggcgtcaagccacttgcagagcaacctccccagcccgtcttcgtgcttgcccttggattccagcacaaccaacggggtggccagcagggcctcgtagcacttccacacgcgagtttggagcggctgcagttgcacggcaggcccacggacatacctgcagtagcgcatgacgcataacttggccagcacgctccatttcagggcgaagtcgacgaacgcagcggcgatccgtgagccaatgcttcgcagggggcccgtaaccgtccacgacaccgctccagcagtgagccacgccagctcccagcgacgctccaccgcaacttgacacgctgcctcagcagcgaccaccactattgccgccaggccgttcaccacgtccgtcgcccacgccatcgttccagcagcgctaattcataatgacggccacttcaacgcgtccggaccgtccgcgcgcgccactagcggcagcccttggcggtcaacatcgacttgcagcggcgcagggcagccaaggccccgttacagccagttggtcaacagcggcgctcgcgggctcttcgaaagtgaccagccgcgtcccaggggctagacgtgctggacgccatggccatggacgtcctgtcgggtggcgacgcgcgccgcctgaaccagatcctcgtgagcctgccccaccccgatcagatgcaggccggcgagcctgccgagcactccgtcctgtcgatcccgctgccgccgttggtgcccacgccacagtcgacgccaccaccaccacgtccatcgacagggaccagatcgaagccacggacgtcttccaagacgaggccgccatcgaagaagaaacagaaggccgaggcctacgacttccggttgccgaagacggcgcccgcgcgactgaagatcgacctgaccgcacttgcgcagcgcgccttcagcaagggcctcgctccgttccgcttggcgtacccctggcgcaagcagtggtgctggtacccgccatccgagtatcccgagttgcacctcgcccactaccttgccaacatgcgcttccgcgagctgtttttcctgtgggcgctgtacgcgccttgtctgaatgccgaccagcggcgcaaggagaaaatgaatgcgtgccgagcgcggaacgagctcatcagctacaacatcgaggagcgagggtacttcggctttctcgacgacttcgagaacggtgctcatgacacgctcatgtggttgggaggcagagcggccaagcactctgccggcgcggctaagagcaagggcgcggcgcacgaggacctcgtggctcccgccgtcaaacagcgagctaccactccgtccaagccaggggttccggtttctcgctccagcaagtcaggcgagtccgaagactccagcgacgacaagaagaagccggcggccaaggacgacagtgacaaggacgacaaggcccaccaaggcccccgtcgcggccaaagagacgctgccgggcgacgaagcagacgacgacggcgaggtagcgagcgagcctccgactaagaagctcaagtcgcgttccgcaagcgtcgacaaggccaagtgcacctcggatctccgtttatcttcttcatttcgttgtagtcgagtctagtgcagccgcagcactaattttgcaggtaaatccaaataaaacatgaacttgacatgcatatccaccattcttgagctgctcgtaaatccatatccacaatcacaggttcttcagctcaagaacatcaccatctacgcgagcagcaaatagtcatcatcgacttgggcgttagcgtccgccaaacgcgcacttcgacgaagctccggcaatcccttcttcctcctatccgcttgctcagaagcggtcaccaacgacgcatacgctggcatcaaagcctacctgggcagccagaacacctcatacgtgctggtcatcgtcaggtacttcacgcccagaccgtccttcatcttcgccactatttccacgatgggggcttccacgcccacaataacagtgtcctcatttcctagtgtcaaccgttccgcgtagctcgacgcagggaggtcggcctcttccaatggcccctcttcttcgttctcctcactagtgcccacaccctcgggcacttcatccatataaggccgggtccacttgccacgataccttttgagcctattcacgttcacggtcaccgttttgctaggatgagtcgggatgtcgacccgataagcgttctcgccgaccttggctacgatccgatagggaccgtgccaagctaaggcaagcttcttcgtgcgcacttcgccgcgtttcgccctgaacacctggtagacccacaccgggtctcctactccataattcacttcgatttgcccttccaggcgctgctcgtgccgatcttgcgccttcaacaattgacgctcaacgaaatgtcgcgagaaacggagagagctgtacagctctcgcctatactgagccacttcattactccgccacttcttgccaagatcgaggaaggccacgtccaacggaagcactgggtcgcgcctgtacagcgagaaaaacggcgaatctcccagggcttcgtggtaagccgtcctgtaggcagatagcactctaggaagataaacatcccaatcatcttgagcctcactcacatgcattcgtagcattcctatgagcgttccgttgaatctctagacgagtccttgagtctgagggtggtaggcagcaccaaagagtttcttaatgcctaacgtctgatagaaggacttggccaccacagacgtgaagttcgagccgttgtcgctcagcaaccgcgacggcactccgtgccgagacaccactccgatcaccatcacctccacgaacgtcatgaagtccaagcgttccacggcgaacgcctcagcccagcgagtgaagtaatcaacgaaaactaaaatatagcgattgccacgctcggtttcgggcagaggccccacggcgtccaccacgagcaacgagaacggccccgtcagatccacgatgggcattctctgcattcgaccagcgcgccacggacgcgcacccttgccacttctgcacttatcacattcgcgcaaatactcctcgacgtcctgtcgccaccctggccagtacgcgtggcgcctcaccttctcgagcgtcttcgtgaggccgaggtgcgacgacagtagatcagcgtgacaaaaaagtaagaccgtttcaacgaacggaagcggtatcacgggcacggtcagcgatcgagcgggtccgacgcgcgcggggagattcactctgcgcatcaacaactcgttctcgacggcgaacttggacgtgatcctcacaaccttcactcgtaagttagggtccagtggcagcgctccacccgtcaggaacgcgatcagggccatcacccacgggatcctccgctgctccaccttcaactgctccatatcgagtccgaacaagtccacggacgacggagggacgcccgtcggcgcggactcgtcctcagtagcgtcttccggcaacgggaccgcggtctccgcgctcgtctcgccgccaccgtctccagtcatccgttcgggcgccacgtcggacggctccccgactgagtcggaagccacggctcgatcggacggctccccgactgagtcgttggccacggtctcgggcgagtcgcccgatttagcaagtcggccatgcccacaggcgagccccccgggttcagcaggtccgctatggtcagcgcgttcacacttgcggtggggaggcgcgacaagccgtccacgtgccccatgctcgtcccgggcttgtgatgcactcggaattgtaggttagacagctcggtcgcccagcgagcgagcttagcattggtcgtgcggttgccaggactgaagatccaggtaagcgcctgatggtcagtgaatagatcaaactctcgcttatccagatagcagcggaacttccgcgtcgaccagacaatgccccagcattcaatttcagagattccgtcttggttgttaaaccagtgcttcggagagcctgtcagtaacttgctagcataggcgacagcacggtctcgaccgtccacctcctgcattagacaagcatcgacagcataccttgacgagtcgacgtaaagcgtgaatcgtttcttcatgtccgggtagactaggataggaggagtgactagagccctcttcagctggcggaacaccacctcacagtcctcgttccagacgaacggaatgtcttatattttcaggcgttccagcggcgtagagatcagagcgtaccccgggatataccggcggaagtagctcgtcagccccaaaaatgaacggatatcatgcacatcgcgcgacctcagcacgttcatgacggccttcaccttctcggggttcgggaggatgcccatgggtgtcacaatgtgcccgagaaaggcgacctgactcctgccccagtggcatttcttcatcttcattttgaagccggtctgttgaaagcgggtcagcacttgccgaaggcgaacgaggtgcgacgggaagtcgtcgcggaagatgacgcagtcgtccaagtacaccaagcacacgcgccacttgaggtcgacaagcacggtctccatcaaccgttcgaaagcaggtacagcattgcataggccaaagggcatgactaaccattcgaatagaccgtatttgcatgtgaaagccgttttagcaatactgtcttcatgcatggacacgttccagtagcctgaggcgatgtccatggtcgagaacagtttggctccactcagcacgtccaggatgtcgtcaatcagcggcataggatagcaatctttgaccgttacggcgttcaacttgcgataatcgatgcagaaacggatgccaccgtcgggcttcctacgaggctggcccaggggctgttcgagggccggacgaagcccagcttctggtactgctggatctccgcctccatcacctcaccctcggcgaacgaaacgcggtagggctgctgcttgatcggtttgctgtccccagtatcaatctggaacttcagcaagtcgggcctgccgggcgagttggacgactccacgaacatgtctcggaagcgctccagctcgctgcggaacagcgacttctgctcatccgatagcctcgactgggtgaagtcggcctcgagcgtcacttccttgtcgggcggcacatcgggcctcgacgccctcacagtctcgccgagatccggccccttttccttttcttcacgactggcagcaatggtggccgccccgctaccctcgagcggacggctgggtgccccttcggacttctccgccgacggctgctcaaagccgaacgccgactcgggcaccacggatgtcgaggccaccaccgtgcccttcttgatccagaactcttctgtcgatgcgttgcagacctccacgacgactcgaccgtcgttcaccgtacagagcgttctcgccacgcaaagcgaaggcggcaagttgagagagccctccacgaggacggtcgcgtttggggcatcacccaccacatccgtgaccaccagggcctggccccttagcggcaagcggacggacacggccatcgtggccatgaacgattcgtggaccaccatcacgcccaacgataagacttcgcccgtgctcttcagcatgagcgtccgctcagccacgtcaatcactgctccgaacgcgcctagcgcgtcgacgcccaagatagcgtccacatgcaacttgtcggccacgagcatccgcatggtcaccccgaccttgcccagcattagggggagagtgatccacccccgaatgcgcagacggtgtccagacgaactgcgtacatgcccgtcgtaagcctccagaggttcaccagctcggcccagacgcttcagaacacggaagtcgacgagactgagcgtcgcgcccgtgtccgccaacatctgcgaaggcaggcagtcgatgtacccgcacgacagcgcctcgaagttccccacagtgcacaccacacgccgaccaccggcaactacgcgtgggagctcggctccacactcatcatcgtcctcatctgcacggacaccgaagccgtccggcaagttcacggttaccacctccaccatcccggtcttccgtccacgctccggcggtggacgctcgggacggaccacttgcacgtagtgcgtcgcgtcgtcgtcttcttcaggacggagctccccgtccagcgcctcggccgaatcccggtacaacgccgtgaagtcaaagcatacgggccgccgcgagcgacgccgcagccgacgcttcgcactcgccgagtgggcttctcaacctcgatctagtagcttattccaaatatacgtagcgttctcattgtagtactcgttcgtccattccttcacaggttctcgccaatcgatttagtcttcattttcaccagcaacttgctcaccatcgtgcacgagacggacccagtctagatcaggtggcttatcacgaatcggggggatctcgaccgtgccgccttctccgagcgggtcgacgaccgacttcttcgcacgcaacatctcgtccttggtctccttcagcaagaagtacacggccttgcgagcctccgacctctcgctcggagaagcgctcgaactcggttcaggagcgtccacgggcaggtccacgcttaccgcagtgaccatctcctcgctgttcacctcacagacatccacggggaccgcaatgttcgcagtcacgctctcctccaccacggagccatcgaccgagacggtcgaggccttcgggtccaggtcggactccgacaggccgaacgactcatacgttgtctcctcgttcgagcgttgtagagagacgcagctggtcagtgactgtttgaagtcacgggtggctcgcttggcctccgccgagttctccagcgcgttactgtaccagtcctcccagtactcgggcgaggacgtgccctcgggcgaggcgtccttcatcttggtcagcgcctcgaccgggacgcccagaaacttcgacatctcttccatggacgggcccttggccctctacgcattctccttcaccttgcccatcaactctacaccatcgagggggtggagcctgtcctccagctccttgtcatactcctcgagctcctcactgatgcctggaatggagagtttcggcgcctcgcactccatggcgtccagctcctcgtccatgaagagacgagcgtggcggggcggctccttaacgtcctcggccgcctcgaccacctcggaactctcgggcacttctttgatctcggcgacagcgcctcggtcctcctcggcgacagccaactcggtggcgggccttgacaccggctcgggtcctacgactacgttgacgttctcctcggcgatgtgctcgccgtccgacgatcctccgtcgtcgttccactcggtgaacagtgtgtccccccacatctacatcgtcgccccacccttcgaaggagggctcctccgtcatccaacgcggacgggggccttccttcttcaggatgcttcgcaaaggggccgcagtcactgacctcggcaacgctctcaactccgtcggcggcggcacctcctccgtgggcaccttctagggtatgttcgcgctcggaggcgcagcacagaacgcttcatcgaccgcactggccgcatagaacatatcaccgtcgacctcctcctcctcggagtacgccgactcctccgacctcacggaccggtcctcgtcgtccgccgagttgatggtctcagccgccgtcccctcttcgttgcctactccacgctcggagctgcggtctgggccactcgcgcggtctccttcgcccgcgggggcgtccagctcggccgcctcggcctccttagcctcttcatcgttaccattgagggcggccccatcatgggcccacgcctcgttcacccttgcactcgactcgtcctgctcggcgctctcctcggtcgccgtcttccccgcagggtacatcttctcctcctcgtcactcgcaacggcccacgccgcttcttcctcgtagcagtatgcaggctcttccgccacgctttcctcattttcgccgtgcacagacaactccgtccggcactcagcttcaccttcttcccgcacggacaacaccgtccgcccctgctctcgctcatattcttcttcgacggagacgccgctgggtacaatccactcttcccgggtacggtaaccgtctcaacttccacttccgctcttggcgactctacgcgttcctcttcgacgctcccttcattcacactactcttcacaaccttgtccaccgttttcctcgccgtgaccgtagaacgccttcgtctcgcctgcctcctacgatcaccccctgagccatcctctagactagagaaaggagtggctccctcctctccttcctcccgcccccgtcactgtcgaggccgcgttcagcaaactcggagtcgcatcacgaagcgcggccaacacggggcactgcatcacggagtggctcgcgtcttggcagaaaacacaaccagacggagcttgagtacccccagcggctgcagtcgggcctccaccgttctggggcctgtcacactcgaccgcgatatgaccaaacgcgccacagcgcctgcagctcatcgacgcgcgcttgcatgtagcgcgaccatgtcccatgaagttacagcgaccacacacaggcgaaccgtcctgcgtgcgactatcatcgcccatccgaatgccccggaatggctgagcgttccctggcccacgaccgtttccagcgggctgagtggcaggggtggcggccactaccggcgctcgattgcgaggcgacctaggcggctgccactggcgctgcataagttgctgttgccacagttgttgctgctccatgaacgacttcatctgctcagcgaaggcctcgaccgcagtcgtcgcgggggcctcctccgacttcttgttcttcttcttggactcgctgtccgagaactcgtcgtcctcctcgatcggacggtgcatgtccttgaatataagccactcgtacgcctccggaatgtccgacgcgggactcgcgtccaaggtcgccagcatgcgcttgttccgcagtcctcggcggaagagctggtaccgcatctgcggattcgggtagtcgagggactcgcacaggtccgagactcggtcaccccactcctccacggactctccgcgctgcctcttcgtgttctctagcagctcccacagctcgtcagccgtccggctgaggaactggttatggaaccgcaccttgagcgtcatgaacgacttgatcctcgagttgttccaccaccggtcagcctcgcggccttgcagcttctgacggaacaccagcaatctggaccggtcggggaaaccgtccgtgtggttctcgaagagctcccagaagtcccgcgccttctccaccgtggccgtgtccgactggaatatcggcagcaccttcacggtatgtgagtacatcgtagacaggttgtatgcactcgtcgaaagtccactggcaccgcgccaactcgccgacggtgcagccgtcggagccggcggagccgtacccgttccaggcgtccgacttgccgtagggcccgttgtaggttgcatgggcattccgccaccgagcggcttcgaggacccagccggactaccggcgaacagcaacttcttcaccggagggggcgacttggtcggcgacgtcaccacgcttccgctcccactccatcctccatactcgggggccttccccgaccatgttgagcgctccagctccatccgaaggcagggcgatccgttcggcgggcctcgggacccgtgtagcggcactcgggcctcgctgcgtcgggaccggctcctctatcgcgtcgtggtagtcttcgtcgtcgtcggcgtacgtcccgtagccgtacccatagtccgccggctgagcgtagggctgcccacactcgaccgtcccatcggactcgagaccggtggctccggctcgcccttcacggcgggctccgccttgacctccgccacggtctctgtcttcattccagccgaggtcaccggctggactccagtcgcggtctccgtcttgaccgcctccttctcttcatagtcttcgtcttcttcatcttcccggagctcacgcatcacatccgacacggacgctccctcttcagcatactcagcggtcttcctccaccgctccagactcctcaatccctcttcaactgggtccggcgcgcccgttccagccggactgggcggcggcagggcccctagccgctgggtcggcggcggcgcaatcccgatcatcagcattccggaagccggtgtcgagggcctctgccgacgtcgttcggcacgctctgcttcggtccgtgcggcgcgctctgcctcggcgcgctcagcccgcgctctttcttcttgttcagcccgacggcgtactgcttcctcagcgttaccgcctcttcctccttgtcctcctggcatcttctcttctcagtttaccgttccttgttcactctcagtttaccgttccttgttcacttgacctcttgctcttgaccgtgcacacttggctcttgtgtctacattaccgttcccttgtcctactggcctggatcgctcctctcactgctcctcgacgccgctttttccgcgcggcgtgtgctcgtgtgcggactcctgggtccttccctggcacactttaaacacgaggaggggggtcacacgtccagtcaccaggtccagacgctcggctcttgactctgttcacttccgggcacaggctctcagcactgttcactccacagtcggcaacactaccctgcttctccaccacgtgtcgcgagtcgctttgtcggaccggtttggggccggccgccgctgtataggagtagtaagtgctgcctgtgcttataggtttatggggcacaaatagcaaggaggtcactaagcaaaatgcaataagtgctccatacgacctgtgtggtccttttaagcaaaattcacgactgaccttccttctactcctaactcttcctctctacctctgcagatccttgcgtttcagcgccttcgggtgactccgttcccgctcacccctcccaaagacttgatccgttcaccttgacggccctcaaagccgcctaacatgccatccgtccccgaagtcccgccacgacacggcaaacacatcttccctccgagatacctccgggtagcgacccacgggtctccaccttagagacaacccggcccacggcccacaacttctcgcccgcatccacagcaggtggacgacctcaggcactcatcgtcgcccacgcagagatggaacggtccgagccgttccgactcgggacatctttacgtggttcttagtttggcttggacgaacttcctgagagtcacggtcgtcgtgacacttagtgcgtatcctaattagcaccatcagtggcattttttaccacaacaatccggctatctcctttctgttgttttccgctgcaaccatggaggcatttttcaccattgcggccgatatacctgacttagtcagcgaaatctcgacaacgctaactcttccgtcggctgatgctgccacgagtttttcactgatactttttaggaaggtagtcttggttgtacaatctggtagcatccgttatcaacaccattcgactcgacctcgatgaccacctcaagaccgaggtgatcgtcggcacgcatggactttactactccaggaaaattcgtgtcagcaaataaaaaaaaacggtcaaatattgcgttctacatgtatttgtaaataacagccacagcaaagtgcgacagattgcagtggcggtatctgtgcccaagacattcgtacatactcgcacaaccgcaagtcggtatgatgccgatcactagtgcagaaagcgtcaccagagtttagacgagttttttttaagccacccagagagacattcgtaaaactcagaggcagtggatgatccactctttagcatctcgctcatcaattggaccagttactggatagtttcctgggtcaattctagcaagactatttttcagtgacgcgaaggcgatcatgaacgttacaggccatctcggcctccacgatcaaggttggaacttcagagagcaaggtggtgtggaaattacctgtgactatccggaaatcgccaaaggggaaggagcggaaatgcttgtggacttctgacatggagatgaggagcagtgtctgaaaacctacgcgcggattgtgtacaagttaatctagagttgtgcgaacggtaagacttagtgctggctgatgctgacatcttgccgcaaaagatgttcaataccatttttgcgcggctcgatataggcatattgattcgatatctttgctggtcggagcacacatatactctttgcagtccgttgaaaaagccggatgcgggcacttttaggttacgacattcatgttggaaaacgcgtacgccccttgctttcagtcatttttgctttcaatagtgcgcttagacttgagctaagacagggagtagcacaatcaagatcgagcgggtgccacagaggattggcaaatggtcgatgaagctattgtactggccataatagttgaagccgggtttcggagtcatttttctcccagaagatggtaactttccatatacgatagttaggtataaggggtaattttcgccgtagattccgattctgctgtcagatttgacgaattcggacttgatgtatgcgtaattaagccttgaaaacatgacctcaattgctcaaaagtttggggaaagggctcaagtagggtaagccaatgacaaacccaaggacatgaacactattggcttaaccctttcggtaccacgtgctgtatcctacaggataaaagttttgatatcctgtaggatacaggataggattacaagcataaccaatataagtgagggtatacaatcgccaaatcacctgtctggcattaagtttcagagtgttgtagctaaccttgcgtcagtaatccgacagtagtacaatagcggacaaaccctctcctctcaggcacgcacctggtgcgcttccctcacgtctcattcagaaacgcgccaagtcgatctcatatctcgagataaccatgacggagctgtctttccccgcaatgtagcggaaccttcgtgctcgagggtggcgccaccagccgccgcgcggcatatcgacaatcacaaagtactacacgccaaaacgggtggaccaccaaggcgaacgctgagcgtcgggtcgacgtcttttggggagaagatgaactactgcgctttgttcccgagcaaggtgagatctaacaaattggtaaaactagaacactcggtagcatgctaacgatagaataatgtctacagacgcgctggaaccgccaccaaagcggccaaagtcgggaagtggttcaccgactgtgcctccaacaccactgccaacaccgttcacctattcaccgcacctcccagactcacggtcgaccgccccagcacgagcacgctccagcactgctgatatatctccagctttggctacacccgcgtcgatttcgtcctctacggctacgccagctcgacatcgttacaaaccggtacaccaacttcgacgccgtcttcggcagcggcgacaccgacccgccgggtgctccctatgacgactccagcacgacatgtactggagccaccaagagaccaccgcacagagcatcggccacgacctcggcaggcccggtcaccatcaagccgggctcctgtaaggcgatcgccatcccaccaactggaccacctgatgtagctgcggctgacgatggcatctttctcgagtcaggggaggagaaggactattccgttgacgatgaagttagcgatgacgatagcatcttcctccccggcgaagacagcgaaagctgcctatctactacgtctactgtatgctcccgcaagcgccgaagatttgtccaagtctgatctgcgccttcataccctcaaagggtgggatgtccacatggacgactcgagtaagtattatctgtatgatacaagagaagtataccaagctaattatcttctcatgtatgctacaggtcatgacgttcagctttcagcggctcagctgactcaagcccaagcggttcctagtgacaccgccgaagctatcggtctcaacctcgaaggtctcttttttatgcttccgaaagccttgtgggtgaccatcgcggatgcgtcgaatgactaccaacgctggcagcggaacgtttctcctgatcagctagcagtgtggaatcaacgccgacgggctcgcaatccggccttcagaccaatgagcgccacccaacggcagcgataaatggctaggttcaagaagatccagccccacgaggttgtcaatttcattgggctgctctgcgcacgtgcgctatgccctcatcgtgggagattgtcacgtcactgggctacgaacgcgcatggtgccgtcccaaaaggcacctttggcaagtatatggcccgccatcggtttgaagaaatcattcggtatctacacttcagtagcaacgacgctccggaggcgcgacgagtaatgacgtggaagatcaaaccagtcgccgatgcgatcaataagagcttcaggagtggaatgacggtgggaccgcgaattgcgtttgatgagggcatgatcccaatgcgaagccgtttcaaccccatgcggcagtacctgaaggctaaaccccatccgtggggacaaagtgctatatgacgtgcgactcggcgtcgggctactgctacagggccgcgatctaccaagggagagaagcgggtgatcgacaggaccttttaccgtcagagtatgctgtgctacgcaatatagacagcgttctacaagggcaacggaatcgacttaacattacagaccgtttttacacaagtgttctcctctcctcgctgcttctcgatcgtggcctctaccacgtcgggaccattcgcacggatcgccttgggttctgcacgagcatcgtctacaagaagaaagagccaagaggtcctcggggatcttatcgcattgcacagtctcgcgttttttcgaatatggctgccgtcacatggatggacaataagccagtctacttcctcgttacaggatgctcaacggcgcttacaaccgtggggcgacgcaatggtgcccacattgaccaagtgcctgctcccccaactggttcgagactacaatgaaggaatggggggagcagatacacatgatcaaaaacgcctccagcgcttctcaattcagcgatcggtgcggttaaagaagtactaccacacaatatttgtcgggttggtcaacatggtatggtgaacatgtacatcatctactcgaagctgtttgcacgcaagtacccggacaagcccgtacccacagactgtcagttcatggaggagatgcaaatgacgttgctgggtgttggtcctagcgactttgaaggtgacatctctctataagctatgtttggcagcctcgttctgccgcacctaccaggcacgagctggaacaagttcaaagttatcggaccgtccgagtggggggtcagtacgcatgtaaggtttgctctatcttaagacgcgcattgcacaagccagcatgggagacaacgtacatttgccggacgtgttccaacgcacacggtggcgacgtcatctacctctgccagcgcgcccgacagcacgatccttccggccccgtgaatacggcaacgtgcagccagatttggcatgatatgtggcgaaatggcacggttacgcctgaaggcgttcgctatcgtcgtcgagcaccacaggatgaacgaggtagttctgcagcttcgagtagcgaggataatggagaataggagctgtaatgaatgatgtaatacaacactccgatgattgctaagtacaaagacagcgcgtggggggccctgattgaggtagtgtaggcctacacgtaggcagtaactaggtcagctcatcaccttcaactgactgaaaaaagatcgtaacgcagcatctacaggataccaggctatgcttggttgtcgatatcctgtaggatacactacataactgcggttagggaaacttcttgaagatggtgccaaaaactccgcaaatactaagaccaaatacgccacaatcctgtaggctacaggataaaatcgatcaaaatcgtggtaccgaaggggttaaacggcaaaccatacgccaaaacagacggtggttaggtgaattgactacattcgccctgagattgccaacttgccctttgtaacataccgtcgtgtttgcataggatttgtatttgatttgacaagcatggatagcattttttatgctgtgtttcggtagtcgctattccgggagaaaatacaagtttaaacaggtagttgatatgtaccgttaagtatccgaaggatgcctcggcgacgacttcgaggaagtttgctggatttggtacgcgctcctgacgcgaaacgccctgctcacatcggggccaatacacttcactaacacttcgcgcgcttaccgcatcgtcttaggctttcctttcattgttaggttcgaagattcattcatagtgattacggcaactccctcatcggcatttactttcaggccaatatccattcgttaggccctggtgccttgcgctacactcttgttgtgcgtagttgagatcattgctcttcttttgagggtcttttgaggtccctgggcctaaaaatagctaagctatcggtgcgagcgtccgcgtgttataatctccggcttcaactattttggccagtacaatagcaaaaaccaatcaattgtcataaaacgtatggtcctgaatttcccagtctaagtacgaaatacccttcaatcgtcagtccctttgccacgatgagcaacatcgctggcccaagcacctgcctggcaggcttccagtatgagcgtctacgtgacatccgcctccccccggaaatcgaagcgctaccacacgtgctgcaacagctcgacctgctgctaatgacacacgtcgaggcagtggaagaggccatgcatacgggccagatggcgtgggtcaagcaactgctgccgacatttagctacgaccacctcgaagtgctcatcgtcgcggcccaatgcggccacctggacatcgtcaagtggctgtcagcagaggtgaggagccacgcgtccgacgttgaggcggacgggaaactcgaatataacgcgctggacatactggaggaggcaattatgaatgccgggggcaatggcagacttgaagtcgtcaagtgcctcatgtccgaggtgaaaattagctccgatgaggaagacaacgaagtggacatgctgaacgaagtggcgtggagggttttggatctggcaacacagatgggccgtgtcgaggtggtcaagtttgtcgctgaatacgcgcgagagacggaggaaacgggccccgcgagtgaaatgtcaagagcgctgtccaatgcaattgacaatggacataaagacgtggtgaaggttttgattagtgcccctcaattccattgggaaatggctccagcctttaagcaggcgttgatggcccgacagcaaggcatcgtggagataatctatgagttgcacgcgggatctgtcgaagggcaaggaggagaattgattgtgcatttggcacgtggggatggagaggaatatttgcggaacaggacgtgggctgagtaccaaatggttctgaacgccttcatctgtgcttcgttgtgcgaccgagtcgacatcctcgatgtgctgcttgagtctgagtacgcgcccgagaagttgttcgatactggttttctttgcgcagcccggtatggatgcattgacgcagtatcgttccttcatggtagaccacagtgttcaatgtggtcagttgaaaaagctttcgagaatgccggcactcttgaggtcacgaaatttctgctcgaaaacacctacgtccatccggattccgtcatctctgcctttagaagtgcactggggctcgagcagaggcaactgggcagtactcacaaggtcgagtgcagtgccattgccgtattcttgcagaaccagcagtgtatcccagctagagtgatcaatgaagcttttcggattgctgctgcttcagactttcccgcggtagtgaaatccatgcgtggcgacgaccgtctgcgccccgaagtggttatcgaagccttctccagtgcagcagatgacgggcgctaccagattgtgcgagcgacgtatgatgagttgttgctgaccaagccaggcatagcggccactgttatgagaaacgctttcatcgctgcagcgggaagcaaccgaaaagaggttgcgagattgttgtggaaaaagggaaagatgccgccgagcgtacttcgaagcgcactcgaggttacgacaagtgtgagtctcaagaaggctcttcgagcaaaactgcgaaacaagtaagatgtgccggcgcacatgtctgccggaaaagctttccgtcaatattcattagcacaaaactagggctccgcgaaggctggctgggataggaggtttttgggataaactcctttattacattttttacgatccacagtctcctgcggctgcgaagcaggctgcgaagcagccgcaggagactgtggatcggtccacacctgcacgttctcaaacgtagcgtcacccgatgcaatcagagcaatgccgtccgacttcgtctggctggcgcacgggtagatgcgtgccgacagcgcgaagcggtcgttcacgaacacctcgacgcacgacacgtccacaaacacgtgaaaacgaagcttctcgcgcttagtttcgcacacgtcgttggtcgaattacccgtgaagatgtcgtacaggtagaagtagctccacactgaggtcgaagtaggggtcacaccattgtcagcgaacacagcgcaagtagccgacgagctgttcaagcgatcaatgaccaccttctctgcgtcgtcgtacacgatggccgttacctcgtcgccggtgctgctgcggcgaacctcgaagccggcattgctgccgcgctcgaagtccggtacctcagcgatcaactcgaacgacgcacccgtcgagttcagcacctgtgacgaaccgttcaacttcacgctgggcaccgcctcatacgcgttttcgttgcgcagcagctgcaggtcgctcagcagcttcaggcccagagtcttgatggtcttgctctgcttcgtcgagccatcagcgcacgatacgtccttcgtgtcggacacgatccagtcgcccttgcccacgaggtgctcgtcgatgtcgtagatgtcacggacgatggtgatacccacctcaagtggcagtgaaagaatgccgtcccagccctggggctggccgtccgagaacccggtgctttcgatgatccagccgatcagcacgtttttgccgtccttgtcagtgttggcgtaccaggagctacggtcagacatgccgaccatcagaggggtaaagagtcccgcctctgagtcggtctcgacaccgcagccagctccggagatcgagcccgtggcctacatcgcgtactgcgtcggatcgttctggccggcgaacaccatcgttgtggagctcaccgtcctcgtcctccatttcacggtaaatggtcatctcgcagggatccgtaaaaaagaattgcaatcgtacaattttgactatgtactcgcacaatattgattcatgctctttcgtaagacgatacttagccccagagagcctgacaaagcgtcttacgttttgcaatcaacgcattttggctacatcttggttttagtatatcagtggctacattgtattttgtccgtcaaaacgtaagacagtttgtcggacaacaatttgcaccatgcgattggccaaaactttcagagggtagtgtcgttgcgtgcgttcctccgttgagcatgtaggaacccggggacaaccgctttgccgtttttgaattgctcgtgccacctacagtcgagccgacgaaataaggcgctcacaagcacgaacatgtagtcggtagtgcggccctactgccaactacaatgtacacgctagtttgagaatggttaagaaataaatgcacccgaaccattagcccaggttgacaaacaaaacgttcagggctttatagtgaattctagttaatgcacaaccaaatagagcccctcttcctccggtagtgcggcccacgaaccctgtcgtgtcctctgaggacgcctccgagcgaagcagtgcacgacgagcgcgcacacatgctccgcaccgaggcgttgtcggagtacgcgagggagtagacaatcagtacattatgggatcttaccaaagtcatgaaatgaacagttttggagtagcaacaaggcagcgtcagccagtcttggtatttgtatttgtatttgtatttgtatttgttgcggtttgcttggctaccttactcccggaggcgcacactgctgcagctccacctacgtcggtagtggacaccaccgacctcacccgcggccacgtgtaggtaagctgttggtggtgtcgcaaacaaataactacaaaacgacgtgagggcctctaagagtcaaatgagcggcgaaacttctcgggaatacatgaaaaatgccaaagctaaagtaattgatcagcccggctaaaggcgcttaccagtttgctcggcctgttactgtagtactaggaaatctaaacgatctaagttcgccgtggtgttttaaatatgtagagggagtttgttggtccttctattgaaccgccaatcattactaccactactatgctgcgcccgatattagtcaggatacgaagtgcaacgaaatgcatcaaaaagagtagcgaagaggaacgcaggccttcctagcagagcctgcgagcactctgcgcctggcagtgccaacagaattggcaagtcgtactattcgccaatcaaatcactagatttgatttgtggtcaaactgtcttacgaatgctcgacacaagtgattgtcgagaccctcggcaatattgtacagaagcgaccagcatctcagctgtggaccagcctggtattaccgcataaacaacacgtggtaccaagaacgaaccgagattgtatctctgtggaatatagtcaggtgtatcacactgcaccttcgatggaccgaacgaaatcactactgttttgaggagaaggaccctgaatcactcgacaccactaccaccgcaatctacaatactttcggtgcttgctgcgggtcccgaacgcgctcgcaagcacggatgacagacaggcccctcgcttgtcgatagcgtttggggtccgacatgtaggtagagtcggtgctgtcggtaatagcaatggaggtgagccccatcaaacgatgacaagccggactgggataccaagcaggaatgccgagaagctctgcaggtgagccttccgcggggaatccagaggatattcgttcctgggacggcatctacctgaacggaaagtcatgaagcgcggcggcgcctgactcacggctgcagtggagactgtcggtcttacttcgagtgatggacagatggtggtctattcaacgccggaatgccgtggcgtgtgtcgacggtgctgcgcagcgtcattggcgtgcgctgtcgccaatgcgggccccagaatacagcacgtcaacacgcgagccccttgcgcaccaaggtgtccacataaccatccttttcggctgcctgctccatggcatcgcacgacgtgctgtggcagccgcccgcgctcaagtcagcacgaaattcctgacagaaggagccatcggagcaacaggatcaaagcaaacaagcagcaactccgagttttaccgccgccacgccagtcagttacccatcctatccgccgcagggctgtggaaaatatgattgcgattgtaatccaagattgtcaatcacaatacctaagtaattgattgttccgtgatctcaatcgacaatcccgttcccatattgtccctttactgattttgaggaatggcgttacagcaaccatatgacgataacacgacagaaattaaagcaaccacaaggcctaaagcaaccctaaaaccagctggcacccggtaatttattttaaatgacgcgtaaatgacagggacacgtcgccctcgtcatggtcttgctacatatatatctaaatttagacacgtcgtggtggcgtctaactgatgttctctacacagcaatacgtgaaacacatgacaatatgtgtcccacattttcaacacttggcagattttgagcgacagcaaaaatggagaagaaatcgctggcacatgagctggtgcgcgcgagaatcgccgagattgcactcctcaagaagctggatgagcttaccgagcatctggaaaagcttctggcagcgcagctacaaatctaagccctcgtcgaagatcgcgaagtaaacagctatgcgttagcagccgtctcgggcgatgaaggggccgaccaaggtggtctcaccgcagaggacgacgctgtttccctcgatgttctactggagctggcggtgcgaaaaatgaaagactaatgcagcatagactctgtatttaaaggtaaatacagactgtggtgtttctcagagctggttctgtagctggtgatgaatctggctagttttagcgacgtcgcgttcagagagatgacgttcttgggagtaacacatgatgacccacagcattttcaatcgcatcaccttgacgtcgttcttggaaattctagaaagttgcatctgcaagttccccgtaagatagctgtgggcttgggctactaccattacaccacagctagcaaaatcaggttgttgaggggcacagatccgctcaatcggatcgaagaaaagatggccacgggggtcagaagccttgtgccaccgctccacataaccacgaagcccctcctttccttcattttctttgtctttcggaattccagtccacacgatttccatttcatggtgatagtcatcatcaatgagcggctcgtacatgtaaacatgcacccgaagcttgcttgtttttttcgtgtagcctaggcgaaggataattacccccagtggtctgcgtgcagattaacggggtggataataaaatttgttgctgcaagtgctgtcttagggagacttggccatccgatagcccatgtcagtgatgacagcacatggcacttccccaccgatctcgcaagggtctccaagcaaaagtgcacagggctatcatttagccatccacgacagatccctcccacgatgttgtcaaagctgatcaggactttgctggagagcgtcacaaattcagtgcgtagccgacttgaagtaaactttgagataatttcgttcgctagaccttggtgccgctcgggaacagcatcacgcagtagtcctgcagttgctgtctccgcagcgaaaagatccacgatggagttgattttacgccaatcttgctccagccactttcggtccttcaaccatgaggtacacttcgccttgatcgcgtagaatcctgttagagcacctacatattgtctagaaacataagcatgttaaagcaaccatatcgctaaagcaaccatatcgctaaagcaaccatacccgctaaatttccacagttttggatcaatcgcctagacgacgtcgagaacaagtccttgcttcttggccttttcatccagtacaattggctgctcctccttccgggtagtagtcgttgctgcctgcattgatagggcgaggtcttgtggaattacaaatgtgtgcatgtagtccgcaggtcgtacaatttcccaatgacaatcaatcttccgagctcttagataggcatcctccagctgaacaggatacttcgacagcatctgcatcacgcgcttcagatttgaggtctttctggcccaaatcaggaactgatccaaagtcacggcaagttcagtggggtacttgtgaacagcaagacggtcggctttgagactgatcgtagtttgcctcagctgtttcggagttgactttgagtttccttggcttggtggcgtaggaactctaacgacatcgacctggcgaacgcgcgactctgtgtcaggcttcgtagagcttgaaaccttgtcacagctactcattccgcagctgtcatgagatttctcgtcgatggggggtcgaattggagatgactgcgaaaggtgagtgcgttgtgtcggtaacacactttcgtcggactcgtaatcgccataattcatggtcgtggggctgctttccaatgcgtccatgagcgtcatagtccccattgcctccacggggtccagaatggagtctgagacaggttcagatacatcttcttcttgcttgctatcttcagcagattctgtagaactcggttggggggcagggttgacacggttgagccctatgtcgatcgtttccttccaggcacttagctcttggtagaagtctgcactagacaaatctgacaggtattccaatagcggttccagcatcgcttttgcgtatgcgtatttttcagctgaagacaatacaacctggtttgcccgttcacctcgccgtagccgtacgtacgcgacttgcttcctagctttgattggcgaagcgttaccccccgcagcataaagtggttgttctggttcagccccagtgtcgttcggcaactttacttccggcaaccttaacttggacatctgcacaattggctgtaacatttccgctgcagccgtcaattcgttgttcacttccaaggtctgctacgtactccaccgatcatgaattgccatagctggaagcagtttgaagcctcgcgtgctaagtgcataagatgacgacatggtaaatggtgactgctataaaatagacaagtacacgtccactccacatcgtgacagcgaaaggtttgattcccgcaataaattttccattgtgaaggactcgacgctgtacgctcacaagtcgcatctgccatgaagttcacaaatcgttcccactcttttctcactttctcgaagatgtcagggtacagtcgagttgctaccgtccggagaaacatcggtatggttttaggaacgggcgaagtcgaatggtgctgcgcgatgacgaacccgatctgatgagttatcatgatttgatgctgcaccaagcccgcaatagtcttgtcaattcgtgtcttgtgccccaacagtattttcacttgattccagtttgactcgatcctgttcgttgtagtattcgcagccgtgaaaaatttgctgcgagcaaagttcgcccacatgtctcgacacgaatcccagttctgttcaaagtacgagaataaagcttgtttcttgttgtcttcgcagtattgcttctctgcaccgtaactagaatcgtaacctgtctctgtggagctgcatatggtttattttccaaagttagcgttaccacaagaatcataaatagaacctgttgcgtacctgtacagcgtttttatcatcaggttgagtaactcgtcgcgttcagacaccttcagcttgtatggggcccgctgcatcaccttcttccagtacgaaatggcatggaattgacaaagtaaaactttcgcagcaggaaatagtgttttcagcaccctccactcaacgaaatctttgtcgatcacgatggaggatatcatccgccaacttgggttcttctcttggaaatactccaggattgttgtcatcatcggagctcgttggttgaggcatatgaagtctacaactgggaacccactaccagtagcggttgtgacgaccagactctctgaaatatccaacacacaacagtagaaaatcactttgttaataaggttgctatatcatcgatatggttgctataactacgcaaggttgccgtaacaaagataaagttgctataccgaacaactcatacgcacccaagtgatagcccaaattgttcgtgccgtgagtgaaatctatcgtaagagcgtcgccccagcgctcgaaaatcaacttctgcacctttgtttgcatcacgataccgcatgtcacgtccatttggtcttgaattacaaggacgtcactaccgtctaactgacggatagcttgcagcatgtctttcaaacgggcctccgctgcgtcgtgccccatagtactgcagatcagattacgggtctgttgaggtgttattttgcagcctagcaaacacacaaagcgcgaacagtaacgtaagtatcactgcagcatatcatatataaaactacgtaccgattctctcattcaggaagttcgtgatgtgcttggaagaaacactagcatccgttaaagtcttaacatcttcgagatcttgctcgtccaacggaagtgtctttgttgtcaggtacaacgatgcttgcgttcgggtggtcgggtgcgtgtgggtaaagttctggttatcaatagcgacatgtgagaaatactaacaaagcaaacaaatacacgaaaaggcagatacctcgtttcttatgacaattcgaaatttgccattttccatccgctgaacggttggtgtcatgcgtgcaggacacccgcaatagtcgccttttctattgcgatgtcccttggagcgcaacgcttgcgaaacaccgtgtgtacagcggaggaccttgtgactccaattaaaacgtgaagggatttggtcccgatgattgctgcatatgaaagggggtttcgttaacaacttaaatttctcatcaaacagaggtcacacatacctgttgtactgatttcgtgtctccgagctttgtactcgaaacttgaggtggtgcttctgcttgtatattttcaagtgtgcgttgaacttgctccaactcttgataatcgctggggtaaagggcggaacggggttgataatttcttcgcgctcctctttgatttcccgcaactcgtcaaggtgcttgcttgatcgcttccgcggtatgtactgcttgttccgcttggataaacatggggccgaatcagcgtcgacagactcgtgaagctgcagctccgccttacgctttttcgcgaaagattgggcttcatccccagcagaaagcttgcatttggccagagcggtatctatcgattccaaagtgaatgtcaatattaatgatagcgcaatctttttgcttaaagcaactttaacgagaatacctggtgttttcttgcgtgctgtggctttctttctcggctcggggctctgtttgcgtgtcctgcgttctaaacaaactaaaaaatacacactacattatcagttcaactcaataagtgtcaacaataacccaaacgagtcttacccgcttctgcttcgtcttctgtgctggattctccgtcgtcgtctgccttcgcttcatcgtcactcgcctcctcttcatcgtcgtcacccatcgctctcctcgtcatcatcgacctcttcttcgtcttcctcctcttggtagcaatcctccgccccttcgtcgccgttgtcttcctcatcctcctcatccagtacaaagtcttcgtcttcgtcgtcgtctttttcaatcccaagagcggcgtacatgtagtttagatcctcgtttacgttccgcagctttcggccaaacaatacataccaacagaattcaaacaaaatgtgaggcacgtagatactctcgttgccaccaagatggagcatactgattaccgtttataatggctccccccgcaggagccatcggtcccccctcgccgtttggtgcttgactgattcgcgagaggtgcgtgccccacgtggcctccgttcagcagcgcgattcttaaaatgagcggctgtgaggtggcgcacttaatggcatcgtacctaatcagaagcgcacattagcgtgatttgcgtacctaagggtttaatggcaatttagacatttaaattacgctcgtaatttttgaaatccctaaaagcaaccatatatgtctcataatggctaaaagcaaccatacctagcagaggaaatacaagcgaaagcttagattacaatcttttgtttttgggattgtcaagattcaataattgattgtttcagatctgagtcgccaatcaataaacaatctatatttccacaggcctgtatccgccgcgcgcattcgggggcgagtcgatatccgagccgcactccttgcaccgggtggcattgcccttcacgaactccttacaatagggacactgcttcttgaccagcacgttgcgcttgaacaccacctcaaacactgcacacaaattcaattcaatggactccactcaaagatcttccaacgtcctcgatcgcacccaccttttttcaccgcgaagaacaggaacacggcgttgatgaggaagttcatgacgttctccacgaacagcccgtagttgatggtcaccgcgccggcatcccgcgctgcaacagaaattacatcaacattagacatacccttgcgcagtggcttataagttagtggtaccttgcttccgcctgctggaagcacgcaactgtacccactcagatcgtacttagatggaaagtgtagccatatccacaagttgaagtgggctgctccgaggaacttgacaagtaaaagcaggctgcccctgctacagtaattcgaggcgagatgaccctgctaccaaatccttttcacgcggatctttccggatcttcttaccgccagtcgtcgcgcgatccaaatcggacggcccatttagcgtgtcatttctcgcgtgtcattatccttttggcgtcgtcgtcaaaccatgccatcctctcggtcgatggtcgctctctggctggcagccacactgctttgcctcgctaatggccagcaagtcggaacatcctgcccgcagcctcgcatccgcaagtcctgggactcgtacactgccgcggagaaggccctgtacactgaggcggtgggcgtggccatggatcgcggtttccaccagaagttcgtgcagatccacacggagcagctcacgggactggaagcgcatcagtcgtgcgtcttcatctactggcaccggatgctgcttctgggctacgagaacatgctgtgcagcctcaacacggcgtatcagtgcatcacgctgccttactgggaccacctctcgggatccgctcgtcaggcgaacaacaactgctccagcatcgaagagtgctcctctattatcgccgactttggcggcacaactactggagtgagcaaatcgctgtcggtttacggctcaagtatccccaactcgatcaagacggtctgcgtgactcaaggcccgcctaccacttctgcgggaacaacacgggatgcgcccactgcattctccggacacgcagcaaatacctgagtgccacaacgtatccgaacgaggcgtccttcgggtcggtgtaccagcaagtactcacgtacagcgactcgggaagtttcacctctgcggtcgagcgaggcatccacagtacgtacccctgctacgatattttttaatgcaacacgctaacttttgtcatctgcagacacgattcacaacgcactgggtagagtgatgacgtacctgcaggccccagttgatccgatgttctactctcatcattcactgatcgacttgctccagaccatctacctgaagtgccagattggcgatgagaaagcttttctatcagcagaaaacaaaagtagcgatccgcgggtctggacgtcctgcactcggtccaatggtgggaacttccggggctcggataatatcaccatgcgtgcactggcgaacgatggcaagacatacgtgaacgtctggcaggacccgaacaacgttttgtacccatttttcaaggatatgccgtaccagtacgctgactacgtcgacgccaaggacctgaagggctacagctacacgtacgatatcagcggcgggctggccaacatgtaccagaactgcaaggattccaacaccttcagtgcgatatcgctcctcgcggatagtcagcaggccaccaagaagaagaatccgctgcttccgacgatatccgagggcacggaggaggacgatgcagtgcgcctctggcacattgcgttgtttgaagctgcacagattgtcgggttccaagactgggctgcgagagatcagatggagatgattgcgtgcgtgcatcatggggagtgtatcggccctatcgacgactacaccaacctgttccgaaccaactttggagtcacgggccacacgcgctgcttctccattctccaggacatcatggaaggcacgcgtatcatcgggattccgatgtggcgcgaaatcacgagtcggttcttgccctgccctttgcaagaggaagatggctcggactcggagggaggctcggaagccgcggtggcataggcttttcttgcgttgaggtcgaagtgggagataaccaatccttcgctgccttgaagcagccatgttatgcatgtactcgtttgcctatgataacccccccccccagcaaattcgccagcgtgtttgtccacaggtcgaccattaacgttaatataattgttgtaatacgcaagatgatggagcccaaacggagattcaccgctcgttcagtaagtaaagtaccacgaagaaaattagcaccggatcttgaacaacggcagctcaacgagatacatgcacgggcttgagctcgaatctcgacgtgcgtggatacctagcagcaacattggggctttcccaaggtgcaccatgtcgcagtgatcgacgggcggggatgcgtcccgcgcaggatttattcgcagccaccccaccacccaccattagccagtggcccgcatcaacgccgagtgaaggtccttcactgaaagacaccccatcctgcctctgcattgctcagcgccacgttgctttcgccgcgttcggggacagacacggcaacaacttcacgagcgtttctgaagcgacgtaacgagtggtgcagagcgatttttctgtattgaagtgctttgtgtgcaaaaccggggcgacatccttctctgcgtcctgctttaacagttccattatcgacagataccaatagacaaaggagactgttctccggacacatgacccggttttaacagccgtttttatttcggggtgcgttacaacaacaaccgtcagtctccatttagctcgacctcgagcacacctcccccctccgtcaccatggtcgagtcccgccatgacgtcgagcaggggctcaccccgcggctgagcaatgcctcctcctcctccatctacttccctcccaccaacggcaacgcccccactgccaccgccggctccaagcagtacatggcgctggagcccgtggacgccacgcactcgttgcgcacgcactgggacgagagcgtcggccacggcgtgcgtcgcctcgtgcgcaccatgcgccagcatgcaaaggcgccctccgtctcgaccgccgacatggccgacaagctccggcacgacgccaaggactcggcgcgcttctactggcagaacctgctcgtgttccagcgcgagatgctctgcggcgtggcggccatgctgctcatgatcccggagaccgtggccttcagctacgcggccaacctggacccgctcaacggcctgtacgccacgggcttcctcggtctggccgtgagtctgttcggcggcgtgccggccaccgttgccggcgctgccggtgccgtggccatggtgatgccgaccatcacgagcgtcaccggctcgctggcctacttgacgtacgaggagcggctacagcacctgttcgtcgctgtgaccgttgcaggcgtgctggagctgctgttcgggctgctgggcctgtccaagctcttctcgatgatccctcgcacggcgcacatcggattcctgaacggcctggcgctcatgatgttcatctcgcagaagacgacgatcgaggtgtgcaagaacgacacgatgcgcttcggggagtgcgagatcgccggcaacctcgagtggatgagcgtgtcgtcggctacgacgtgggtcaccgttgcgctggtgctcgtgaccatggccatcatgcactacttcccgcggacgccgttcgtgggccacttgatcccgcccacgctcgtggcggcggtagtcggcgtcggcttcgagtttggcatcaaccgcccactgctcggctacgacgtgcgcactatcggcgatacgtctcctctgaacggcggactgccgactttcgctctccccaagttcggagacgtgcaggactggggcgtcgtgctgtctacggcggcgagtatcatggctgtgggactgtttgagtcgctcatgacgttgcagtcggtggtggacctgaagaaggagcagctctcgcagacggccacgcgcaaggagtgcatcgcgcagggcatcggcaatgtgctgtgcgggttcttctccggtatgggaggctgctccatgatcgcgcagtcgaacggcaacattttgaacggagctcgctaccgcttgtcgtcgtttatgtgcggagtttgtacgttcctggtggtgtttttcgccagttcggtgatcgagcgcgtgcccgtggcgtgtctgaccggcatcctgttcgtaatcgtgatccacacgttctactggccgtcgctcaagctcatcttccgcgtcaagatcacggacgccatcgccattgtgctcgtgacggcgctcgcggctgcgatgaacctggccattgccgtgatcgtcggcgtcatttggcagtgtctggtgaacggctggcagagcggccacttactcacgttccgcacgggcatggaggtggtgcctgtcgtgaacgcccagggccgcgctgcagacaacgagctgctcacgaatcacgaggaggccaagatctactacatcaagggccagctgctcttctcgtcggtggcctcattccgcgagttcttcgacgtcctccatgacccgaacgtggtcattctcgacatgtcggactgcgtgttcgccgacttctcggctgctgcggcgctgcgtgaagctgctatgcggtaccgtgacgccggcaagacgctggtggctcgcaacctcgacgcgcagtcgctggacatgctgaaccatgacttcggctgggactctgtcgagaggattcagatcgcgacgcccggtacggccaccaacggcgacgacctcgccaagagcaagatcgacaaggagcgcgcttctcgctactcacacggctcgcaggcgtctcgtggttcgctgcaccagcttcacattccgtcgccgtgcgagtcgtcgacgccctaccgtcctgctactgggccgtaaactttttttattatgccaaagcacaggacatccgacacaaggttccgccaacgcagggtcgtaagatgccgcagctctcgcgattcctagtacacttgatgttgttttgaaattgcaatgatgcaatgatttacgtgttcgcgtagccaaattacacctgcgctagtctcagtttagctagtcggcggcatagtgtggtgtccgcatacgtcgagtctcctttggctggcagtgagtcagcaatggtagtcatgagggccttccatttacgtcggtcttgggcaagcagtcgaagtctctccaagtctgagctggtgcggaggcggtagccacacccactagcatcaaggtcctggtcgaggacaagaggcagtgtggcgcggggcctacctctccacttgctgctgtcggaggaagagaaatacgccttcatctggataaacgccgggatatcttgtagtcgccgtagaatgtgcccgagaagcccccacctcgcagatgtgatccggtgacggagcggccgctcgtcgcacgttgcgtagagatcagcgttttgaaattgtgtttggttttccgtatggacattttttagggtatccataaagctgttcatcttccttgacttcttggcttggtacactcctggccacaataatacggccacccctaaaaattaccataactccgtcagttttgcttattatgcggtgctgttttgacacaagtagcaaaacacggtgcaaaaggcctgacatgtgttaacgctcgcgtttttgcaatctaacgggtggctcacatacaaaaaactgttttggcaaggtggtcacaacttacggccaccccatcccaatacaaaatcctatactaattgaatgcttgtacagagtgaaggtcgggcaaatgacttgagatttgtatgggtctagttagtgaacccgctagttgggctaaatcgcgtcctagagaagaatgaaggcattggtcatcttagcataagtgtaaactacagctccagtaaattgcgcgggacctcgggtgattttgagggagatctagatgccaacgtaaatctaaagtagcgtcgtgacaacgtccatatgatttgtatgggacgatttgatcaggaagtgacgagtcgaatcgtactcgtgtgtgcggactgaagcctcaatacttgttccaacttcggttaaaatattatctacgttacttgttgctgctgcagtcatccattgtcctttagtacggcaggaagaagggtttttcaggttcactaactacaccttttcaacttcaaaatggcaaattgtaagttcaaaacagcaaaacgtaaagtcaaaactgcagaccttgcgaaaatcataatcgaagctatatcgcctttgacggggaatactcgggtacggtgcctgggcacggataccctctggttagcactatattggaggctctcccgatgaccaacgacatacaaattcaagtcaaaaatcatccggatagtgcttagtgatacgagattggaatatatcaccatcaagagaccattaactatgagaatgtccatttcgtaaagcatgtccggcaacatcaactacaacgtgggtcgcttgcgaccttgaaatggactcagattctctgggttcgcacatattattattcagttttaaatgatgtgattctggaacgtgcatttatcgtatcagcttgggcgctagactagattgctgcctgtgcagtcctcccagtcccacttgaatagtggccagcgtatcatcactcatccagccatatagtagtaaataagcacataaactacttttatctagtgctttgatcacgtatcgagtgcaatacaagctcaccaagtgcctgaatgatggtgttatcactacactggtaccttgaacgataagataccgccaatttggtacagatctacatagtgatgcctctgcatagtgataaaaagtggtctcccgaggctatcactacaaagaggattgtctgtacacgagccaagcatacggtgcagttgaaagtatgtcccaccgccccgcttacaaggacaaacgccaacccgccgtaaaccctcaattccctcggccagccatagcaactctctcactcgcgaagcactttgcaattcgcttgctacccctcagcgcccgaacaacagccgccaggtcgtccgacgatgcgattcaactgctttgcagtcttggccgtcacctctctgctggcgtgcgctggcagcgcctcgacgtcgtcagtcaccaagacgatcgagcacgacttcccagctgccatcctctcggacgcgaactacaacaatggcgcaccaggcgccaagagggtgttgagggctcacgaaataccggacaaggagaacgaagacagaatgcttaattgggcgaagttgaatgcttggcccttcaaagacaaatctacgagttacgtcttgggaaagttcgagttcgacccgaaagtaggtgaggcgcttgattcgtctcgtttgacgactttggccgagtacgtggacatgttcaacaagaagcacccaaaacacaaggtgtcactgttcgagaaattacgagggaaatcgcgacgcggctggaaaagcagcagtttgcgttttggcgggataacagcatttcccccgacgacgttttcttcatgctagggagcaaggctgatgcgcaacacgccatgcacagccggaagttggagacgctggagcagtacatccccattttcaacgagcgctatcaggcgtcacaaacggacatgttcaccgtattgagaaaaggtttcggtgacgctgattttgctcgcgcacttgcgatggccaagcaggagcgtttgtcagcaactatgcgtgaaaacggcgaaaagtatcaaaaggagttgtactcgaaatggatggcgatgggcaaggataacgaaccttttgacacgaacagggttatgaccaaagtgttcaatctggaaaggcttgaagatggtaccaatgcggaaaaactcgctctcaatcactacagcgtattccacaaaaggatgcgcgaacaggaagctcttaagtcgaccggcaggtgaatttaatagtaagccccgttgcattcgctttacatcgaatactggaagtattagctaggacggacagctacaaaagtacgctgcccattcttgcaggtatcacccacaatattcggtaactttccgaacgaccccaccatctcacgagccttatctccctctaatgtgaaagactgcgtgttcaatatctcagggaggtggcaggacagcactaaatgaagacaaattgcagcacaaaaaaaactgcgttcaacgtttcctctgcctggacgtctcgattcgatgcagtcctcttcagtaaatgtgccccccatacacacgcgtttcctctacataatgaaatagctacggctcattagtcgggcggtacgccgtcgacgactcggactacggaatgtggagctggtgcaacgatcccgagggcgcctgagagccatggagaaaagcgctcctcgtcgatcttgcttttggtgaggtcgacaacgtgcctggcaccagtcagatccctgcttccgagtagatcattttatcagcgcagaattttgggacacattagcagacgccgtggctgctaagaagacgcaggtgatgcccgagcgtacgaatattcgttatatttctaacacggccttttttgcttagtggactaaataataataattaaattatactccactctcgacgtattgtgcctttcacgtattttggcgggtgagctgtagattcaggcgtaattagtcataaaagggcgatcaacgcttatttacagctaattctgcctaagattgtgagcgcttcccctaacacccgcaatcagcatttgagagccaatcgacggagatacgagcagaatggcatgaattggcgggtaggaaaccgccaatcgctctgtttccgcctaacgaaggctggattagcttattccgcgttagctcggcctcaccatcgccgctcctaattcggccatggagggacggcccggaattaatatgagaattagctaactcgggacataattaaggtcgataaggaattagagttatgccagaattatcacggcagaataagtgaaaggcacaaccaacattagcccaaatccttgtaaaaatgcacatgtagcttcgagttgcaaaattctagtgtctacaacccaggtccccattctaaatcgcacacacatacaagtagctgtaagttgtggatggtcattcagccccaagtagtgtacataagccacatctcgtgcatatttagggcaataccttttggcgtttctagaaagtgtcattctctaatgttgtttttacaggacattctgcaggtgcgcgagtcttagtacaggacaaaaatcctgttacaggactcctcttacctttcgatttgaaaaatacaggatccctatgcttctgttacagatagtgttcgcacaaaaactaattgcataactaacactagcgctagcaagctgtttgttagttcgatcgtattagcaaagtgacaataatgatcctcaattcaaaaacaaacaaaaaaagctgtttgttagtgtatagtgaatctgggtatcatggttgcggagttaggcgattttttatcaatcatcttaacgctctttttagttgtcgaaagtacccgaatccgggtatacccgaggcgggttcaagaaacgggtacccattgcgagccctgccgcttaccaatgcataccttagatttccactatcgctcacggctgggggccacaaatccttcgtgttcgacttctttaaggcgctccgggccggtgcggcctggagcagtcccagggtgaggtgcggtggggcaactgctggcttgtaggtaaaactacgaatgacttgctagactacttctactacctccgggtgctgggattgaatccatgcgatgcgccagcgcatttgggatgtagccacttggtgcgatgcagcacagaccgatctgagcagcgtccttggaccacaatagccttcccgctcagcggaaaactggtctccgcccacaacaaggggcggaaaccttaattccatgcacctgtaattctacgaacatcataaggttgaatagataatattatatagtgtactccgcaaacatgttattgtgctttgctctcattctgtctaaacgaaggcgtaaatcgttgttttgtattttaacagttaaaaaattaaactgttaaaatacaaaacaacgagttacaacgagttaaaatttaacttcatcgtaattcgttgttttaccataacccaacgacccttacttcgatggcattggatgccattctgtagcagggtttgtagcacgttatttgcgctcgtgaacgacgttccaacaagtaacgtccttaaagtggagtcggtagttgcaagttgaggcagcgcacaagttcaaatgaagcctatgtactcaaaagtccgagtacattactcattactcagaattatgcgaaatgtactcaaaagtatggacgaccctctcgtaccagtcagcttttgacagctaaacgagcctcaagataaatcactaaactccatctgagtctgcaaccatgttagccagattcacgatacacgaacaaacagtttgcaaatgctagtgttagcaatgcagttagcgtttgtgcgtactataattgaactcgatctctgtaagatactcacagtaaaaaacagcgactcattttcagtgaatgtttcttcttttttccagactcctatttcttcttgcacgaaatcggtgacggggtatcagtaagttattcccgtaagttattgcaaattatttttacggattttggaattactaccaaatgacgccgccggtcaacaggtccatcgcagccacgatcacgtcatgattgaatttggcaactctacatatgagcatgaagtcaagctttgcgactcatgtggataatgccaaaattttaataattgccattctccaggacatccggctgctgctcaggtcctgtaagtagtgtactccgcaactattaactcgctgtacttaagtaagtgctgttagcaaacgcgtttgtatgtttgcgctctgtcactagcattcaaataaatcgctccttagttaactgtaagcgagtttgtactggttgtcgaatccatattccacgtataggcaccatcgttattattgctgtagagaggaagaacttaacatatcaggcaagtgcaacgggtacccgaagttgacgaaaatagtactaaatagtaatatttcttaattataccagctatatcatgctcatacgctccacaagtccttttcactctgtattgatttcgacgtagttattaatgctacttaccgaatttgttttgtagagggatacaccctaccggagctaaaataccagacgcccgatttgctcaaaaaacgaatcggcaccagacgcccagatgtatttatcaaaattactaaactgagcactctacctcaagtctctcagggccgaatctcaccaatgcggctgccgacacagcccaacttattagcttgttcgccgccaccaccccaacttgagatcgaagttcagtagagcaagctttgcgtttgttcctgccgccgacagaagcacccccaccaccactcttcccccttgatacttttctgtaggtagacccggaaagaacgtatcttcagcgaaacaaacattgcagtgtagtctcaggtgctcgaccatagccttcttcattgcagcagtgtaaaatggtagggcccgcgtcgttttccacctgccttgacctccagacaggcgagggtgacttggtggcgcccgcgcctttgcagaaacgatcgcgcgctgagcggccgagagtgcaaaaatttctggcttgaaactggtgtatccctcaacaagtcaagccctgtcaatctgaagacactattgtgattggctaatactatcctgtatcccatacgtgggtgtatccctctacaaaacaaattcggtaattgcaacaattatggtaacaataaactttaaatgcaattatcttactaaaagtatatatattaattttacaattattttaatttacattcaattattcaataattgaatgtagattattccttctatgaaatttcattttgtttcgatgcggatttaccagtcagctaaattctgtattggacatgccgagcatcaaaacacatccataaccttcatgcgaagcacgtgcaagacttctcgaaattatattttaataaggtacccagaaggacgtcggagcaatactccggtatccgtcttgcattgacgaacgaagaatctctcgccaacatacagaatgccgtcccctctcactctcgaagacgcggggcgggctcgtgcatgctccagatcaggattttatggggaacgttgctaccacaagcaaatttcgtaaaaggaacgtgtttgtgatctgtttgtgactcgagttaaactgtcgtcgtgggcagttgactattagaggtgcagccgataagatccacaaccttcacaaacgccacaaacagccacaaacacaattaagcgtcgaataaaagtttgctagtgtggctcaactcgtttccgcctcactgcaagccaaactctgtagcggattttgcacgccaatagctgcagcctagcgcagtcacgtacagcgcaaggttgcagcgacttaatcctcacacccgacctggttagaagggcgttctcccttcagcttcgggatcgagcccagcctggagcttcggttcggcgtactagtctttcaccgtgacgtttccgaggccactaccgtgcttcagtgcgactcgagctcgagttccagcacgggctcaaccgctcagacgtcgcgacaaacacgactgctgcactaatatttttttgttttgttttggtgcaccgcatgctacaaaggttcaaaggaaaatgccatacatttacccaacgtatgtgccaagcacgtcacaaatgcttgtggcagcaatgccgggatttattcgcggtccaaccggtcaacttcgcatttcgatgccgcggctctgcacacaaattgacaacacctcccgccgccgccgcaaggtgatcgttgcagcgagcctctacaacctcctacagccgtgcttcaagcagggttcttggtgctctgagcgccaactccattgccagcattgctcgaggtgtgtctgcacaaaagtatcttcatggtctcagatcctcatggctgcggatctaccatctgcgctcgcctcgtttgcagtgccaatccatcaagacttcaaggcctgaaatctgcaacccgcgtgacgagctcgagtccgctgctgcagaaaagccggcgaggcgcggagcccatggacctccacgtagctgagcccgacactatcttgtgcacgacccaatcccgccagcaccacctcgggaagttgtcgagccttgcagcccgagtcggaagccgcggtcccgcccagctgggggagtcggcgctgcttgccagcctttggtcgccgcgccacactcgagtctgccgagcaccgcgcaagcccccgccccagaggccgaagacgccatgagctgcatgtcggccgaacgcggattcccgaccaagcgccgcttcccgctgcgcgccatcgagcgcttcggcatcgccgagccggacgtgtcggtcaagtgctgccacgccatcgccatcagcggcgacatggaccaactggtgcgcttcctgccgacggccgtcatgcgcacgttcaaccggcacccacgactgcgcgcgctggtggtcaagagcgaggagttcacggccgaggtgcagccgcagatcaagctggacgacgtggcggccaagaagctgctgcgcgtgcgcgagatctccgactcggacgaggacgtttccgcctggaagaactggaaccagttcgtgcagagcgagacccacgtgccgttcgaccgcttcacgcagttcatgttctacctcaccgtgtgggtcaaccgcgcggagggcaaggcgcgcttcttcctcttctcggaccacatcatgtcggacggcgactcgggcatgatcttcgtcaacgacacgctcgaggacgtggcgctgctgtccatcgaggccgtcaagcccgtcaaggagctgccgctgcggccgtcgctctatgacatgtggttcacgagcccctggtggctcaagcccgtggccaagaccgtggtcgccttggtcggcggctcggccttcgtcaacttcatgaaggtcttcaagcccgtgctcaccccgcgcgcggaccagcaggacttcggcatcccgttcaagcagaacagcaccacgctgctgagccaggccggcagccccaccaacatgcgtgacacgctgcgcaagtgcaaggaggagggcgtcacgctcggcggcgcgctcatcccgatgctggtgctggccttctaccacgccagcaaggtcgacaagaagctcaacggcacggaggagaccgacggcccgttccgcttcgtggccgacatttgctacaacatgcgccagcgcgtgccggagcccgccgaggagcgccaggtggggctctacgtgaccaacacgccgctccagtggctggccgccgagggcgtcaacatgaagaccgagaagttctgggacctcgcgcgcacgtccaagcaacagatggcggagcagggcgacaagctcctggagatggcgctgccgtgcttcctcatggaccgcaagctcatcaagcccaaggtcggcgacctgctgggcgactttaagatcccgagctcgtgcacgggcgacgcgactatctccaacctcggccgctacatctacaagaccaagcacatcctgggcgccaacggccagctcaccgtggacgacatgttcgccttctgcgccatcccgttcgtggccacgtcgtccacgatctggctgtccacggtcaacgccttcaactactcgctggcccacaaggtcgacgagcaggtcggcaacgcgctcttcaacgcctacgtcaagatctgcgagaacgccagcaacatccagaaggacgagacgatggaggaagtgctcaagcgcctcggactggaggcctagatagattgtccatagtattaaccaccccatgcccatgaaaacgaagctccttcctagtaaagccccaatgcctccttcaactccctctccgacgacatcgatcggcaccgcactgactcagtgccattgagacacgtacggtgatcacaagcgcaaatctgctcggcaaagtaagcaagcacatctgcttgaagcaatcatcggatcttgttggcattgataccatatggcaacaaggacagagagctgaaaagctggaagcagcgtatctgcattaaatgtcgagctctcgctttcccttcattacgtcaactagcgttgtggagaatggcgctcgtgatctcgcgtccttttcgattgccgactagggtagagctcaccactttcttctccaatacgtcaacatactgtttcaggtcgcgcacttgtcgctccagcgccttcttctctgtcgtctgctgccggatgtacgcgaggtatttcttgaggtgggcttgctgcgttcgggacgtctgctggtagctctgcgccatcgactgcttccggtcaaggagctgtccgagtcgcgcctccagctttgcaatcagctgctggcagtgcagcagctgcaggtccttccccttgagttgagcgcgtagggatgtcagcggaagcttgcggagttggctcgcacgcttcttcgctgctggtcggaagtcgctccgcgcctcatcgcggtgttcatcgccgtcgctatcagtttcgtcgctggcgctggcctcgtccgatataacacgcagtaagcttacgacttggccttcccttgcttcaacctggttgccaacacaactaccagctcgagatcggacgcggccatttgcagtggcatctcgctgtcttctccgcagcgtctcgagctctttctgttgctggacgacaattgcctgcaaactctgggcttggctcgcttgctccagctcccgttccaccgcacagcttttctcttcgacttcaacgtccggcctatccaacgcttcaacttcactccgagccgacgtgctctgaggctgatccgcctcgcgtcgcttgcagccacgcgccatcgcctcgttcagccgcaccagctcctgcatctgctggaacatggcgacgcactggtcgtggtcctgccgcgcccggagctcactcgcctctcgcagtctcgccagctccttccgaagagcacagcacgactcgcactgcgataatcagtcaatgcaccgtcaaccaacatgcactactgtacatgcacaatactggcaatccacggcaatgctcacctcgcgcttcatcctatctgttcgtctccacactaacttgtgcgcacgaaccgacacaagagccgttacatgtagccatcttgcgtccgtcagatggctacacgagctcaacattccccgtcatttgcgatcgccacctgtttcttatccaggactcgcgcctctaccccccgcgtacttgtattaatacgatcggtctacttcatccgctcgccactcggcccgcagcgcacgcgcagtccgcgttcctcgccctcgttgtcccgcacatccgtctccgtccgccagtgcgcccgccacccttcaccgcgccctgtagcgcccacccgaccgccgccaagtagcggtacccgttttgtggtacaattatgcgcagcaccatgatgcgtcgccgcgagagcaacctgacgctggacgaggaggacgacgtggccgtccagatcgagcgcatcgagcagccctggatggcgctcgagctgttcaagacgctgtggcagaacgccacgcagcacgtgagctccagctgcaccttcacgcggttcaagctgcgagcttcagttgctacaaaggacaaggagcaggaaacaggagctgcaacgcagagcagcagcaacaataagaacgcagaagttgcgggagcgggggcgacggagagcttccaggagcagtttgccaagagtttggggaaggatctggtcgtcttcccccaacagaaatcaggacagaagggccccttcgtggtgctggcctatgccagtgtcgcggacaactacgggctcaagacggtgctgctggtcaggatggagcagctccatgactcggagcagatcggcatcacggtgaaaaatacagaccccgtgcaccgcaccaggatggcggcgttcttaggcattttgcagcagcgcatccagccgggcagtgcaccgaagcggccgcacccgaggatggcggatacgagcaagctgttcctggaggagagcgaccatgaaggagccacagactcggacacgtcgtccgtggctccgtcgacgccgccgcttaggtcctcgtcctcggcttcagttgagactccaccgaggcgaaagatatctatgcaggcgtcggctccagtagcgaggcctcttacggtgccccggccagtagaacgtggcagatcacacacgattcggtaccgtacagatcgggacatcgcgtttgaaggctacctgagcaagaagagcgacgtgctcatgagctggaaggcgacgtactgtgtattggaggaggacacgctcgcattttacgagacgcgagaggatttcatctcgaatacgaaactgattgggcggattcaactacaggggattgagcacgaagacatgggcaagcccaacggcttccgcgtgatagcggaaggtaaccacatcaaccacctgagctcgcggacagcctttgagaaggagcagtggaaacgcgctatcagcgtaagtgctgctttgatgtattgataacttgttgtggctgactcgctttgtgtgtatacgctgcgtgacagatcgccatttctaaggcgccagaggtgacgcgcccgtacgtagcgttcgcatcgcagccgctggagccacacaagttttaccggctgcttggtgcactcttgcgccaggagattggtgatttcccattactcttccggagtatgcacccggatgtcgtcgtgacatccaacttcccaccaattgtgccgttctggggccagtatcgccgatacgacggagttctgctatttatttcgacgcttctggactcggtcacggtggataatttctcgcttctggaagtgattgagctcgtacgtggagacgccgattgcgtcgacgaaactggtgcccaccatgatggccttacgtcctctccgattccagtggactcgtacgttctgtcacctaagacggtcgaagcgcccaagtcgactcctggaagcgcatcaacaccgtcgtcgcaatggacaagacggcttgtggtcactgggaaagagacgtacaacttgcttgacacagacaaccggcgggtcacgcagctatttgtacacgaattgtggctggatcacaaagaccgtctagtacgctggcatttaaacggtgacgcggttgctctctcggtcgcattcgatgacgcaccacgcggggagaatatccgactggttctgcccggcgaaacctctgctatctcgcactcgattcccccgggaacattttacgtgcagattttacaagctcagcagcttcacgcatccgacagtgggggtgaaaatggttcaaagggaagtgctcagcactcatcctccagttcagcccccaagaaggggtacccagtctacgcgcgctgcattctggaggagggcaatcacatggaacaaacgttgcgtggattaaacctgaaagaaggtgaaaataagccggacgagctcgcgaattcgtcgataggaggctctcacaaagagaaccgccgcccttctaagggaacccgatttttccgtgggttaaaacgtgctgccgggatatcaggagaacgagctgtggcgaaagttggcgatccgagtgggtgtgtgacgaatatctgtaagtgtatgccggtgacaactcccgatggccatcacaaagttggcacgctcaatcccgactggtccagtaaccttcgtctcgagtttcctggctgcgcacgaggttttacgtattttctgaaggttgaggtgttccagagtcgcttcatgctacccgacgagctactgggtgtatgcaaaattaacgtcacgcctcatctttcgctcgtgaatggatccgccgatgcaaaggccaacggggctcttcctcgctggcacaatctgtgcgatcagtacaacgactgcaaggaatcgtgggcacccccgacagtatttcgcggtcggatccagcttggcattattttcgctccgtccgtgacgtctgtggagaactttccccaatctcaggggctccggcgcatggcaagtgatggcaggttagtggaatcaagacgagggtctggcgacgaggcgttgctgcaaagttcgtccagctacaacctccgcgaaatcatccgctccgacaaacgagcctccactggagcgtttaacattccgattggaggggaagggcgttatatttcacgtgaaattcggagtcgaacgaattcatcaggaaaggggatcgtcaaaacgggaaatgtatcggtggacagcgaagacaagcgagagttggcacggttaactcgcgataaccacacttttacggggaagacgacaaagtttgatgtcccgaagaagtaccagttgattaaggtggtgggcgctgggacctacggcgaagtggtcgctgctagtgacattgagtcaggcacgactgtcgctatcaagaaagttaccaatgcttttcaagatttacccgataccaagcgcattcttcgtgagctgtgtctgcttgggcagctgaaccatccgaacttgattacactgtacgacgtgcctcgtccagagcggttgtcgtacttggaagacatctatctagtgacggatctcatggagaccgacttgcaccgcgtgattcactcgacgcagacgctgacggacgagcacgttgcgcacttcatgcggcagattctgcgagctttggcctatttacactcggcaaatgtccttcatcgagacttgaagccatcgaatatcctggtgacgagcacgtgcgaggccaagatttgcgacctcggacttgctcgatacgtggattattccaaggcaaaaaaggtaaagggagcttcccaggaagacacttttgtggagttgactgagtatgtggtgactcgatggtaccgtgcgcctgaaattctactggacggctgtcgatacgacaaaccttcggatttgtggtccgctggctgtatcttgggagagttgctaggccgcaaacctcttttccccggctccagcacaaccaaccagcttaacaagatcttcaacgttcttggcaccccagatctctcgtatatcgccaacattcacaaagaggccgcacaaaagtgggtgcaccgacagcgacggaggtccaagatcccgtttgaagagctgtacccgaacgcgaaccagcaggcgctggatctgctggagaagctgctagtttacgatccgaagaagcgcatcactgccgctgaagctcttcatcacccgtacctgcgagaagcgttccgatctgtgatgaccgacaacgtggaaggggatgaaactttcttttacgatgaagcagagcagggcgaagacacgtttaaggggaaaatcgacgactcgaacgagtacgtccccgaatccaagctcgcgatgcaagaggccgtgttcgagcaggtttgtaagtttcacccggaggcgagggagtacgaggagtggctgaagaagcacgacgagaagtactgtgtagacccggcaaccggcaaattggtgcccctcaagacttgattgaaactatgactcctgaactgcgaagataaaggactgaatgccactcgtaaagattgaaacggaccgcagtgggggcactgctcacgttgctagaacacggattgtttttcgttaaatgcagatcgcgactgcgtatacgaagatgacggtaagtgctttctactgtctagcatggctgctgtcgaccctgacatggtgcacatgtttgtttgttgtagtggtagcttgatcgccgtcgtccaagcctcgcagctggatactaaaccgaaagccatcacacggtgttgtccgagtgaggggctgaaagcaacaagcgcagcgcgtcttccagggaaatgctcgggttcccactcagcagacgcttgggcaggttggtcgccgccagaatgtcgtggagtcggcccttggcgttggcgatagcgaagcgaaccttgcgcaccgccagcttctcctgcgtgtccgacaatacttggatcgtagttgcgtccaggtcgttcatgtggtacgcgtccagcaccacgccgtgcgtcgtgatgcccttcttcaggagtcgagccatctcgcgttcgatggctttggctacgcgctcgcagttggcgaagtacagcgaactctccacacgaacgacaacaatcccgtccaggtgacaagcatttggaaagaggtcccggtccacgaggctgccgttatccagctggccgagaatcacgaccggagagcgcttggtcttgatcatgagcgccagcacggagcagacgatggaggcgatgaggccctcgagcacgcccaggccgagcgtgagcacgaaggaggcggcccagacgaagaactcgtcgcgcttgacgcggaagagccacttggcctccttgaactcgacgagcgtgtagcctgcgacgatgatgatggaggcgagcgtggcccgcggcaggtagtagagcgtgcccgtgagcgtgtagagcgcgatgatgacgatgagcgtggtgacgatggaggcgagctgtgtgtgcgcgttctgcatgttgacggctgtgcgcgacatgccgccggtggggggcatggcctggaagatgccgcagacgacgctggcgacgccgatgcccgtgagctcctgctcggtgttgatgtcctcccccctctggatggcgaggcgcttggccatggcgatgctggagaggaagacgacgagcgagacggtgagcgcgttgacgaggatggtgccgaagcggccgccgtcgatgaggtcgtcgtcgaagccgtaccagggcaggacgggggcggggaatccgccgggcacggtgccggtgagcttgagcgccttgggtccgaggaggtatcccacgatgccgccgaagatgcagacgacgaggggtccgaggtcgcagagggtgcgcgcgaagaagatggcgatcagtacgggcttggacttgggcgtggagtcgtcgatggacttgcggttgagcgacttggcctggttctcgtctgcttgagcgcgggccgaagcgaggccgacgtactgctcgtccgtgatggagaatccgtgactgtcagcgaagttgccgctagcaggaatctgctgtgtattggcggagttggttttggccgggtcgtcgaagagctgcgagagcacaggcgaggggaagaagcgcttcttgatgagcttgacgccgatgaggtaggcgatggagatgagccccacggccagcgcgttcttgttggagtggccgatgttcttgaagttctggtagagcgtctgcacggggtagtcctgcgagtcgaacttgacgccaagcacgttctggaactgcgagagcatgatgagcagtccgccggccgagatgaatccgcccatgacgggtcgggagaagaagtcggcgacctggctgaggttgagcacgcgcacgagcagcaggatgacgccgctgaggaaggcgatcatgatgccggtggcgacgcgctccttctcgtcctcgatgggctcgaggatggatccggtgagcagcgcgacctcagagccgctggcgacggagagcacggtgctggagccgaagagcgcgtagatgagcggcgccgtggcggccgtgtagagtccgtggtgcgcgggcacgtgcatgatggtggagagcgagacctcttgcgggatgagcatcatggcgacggtgatgcctgcgacgaggtcgaacttgaggtcttgtccgagtttgtagttgcgcagccacttgagaatggggaggtagtgctgggcgagctcgaagggcgttttcttgggcgcgaggaagcgctcgttggtggggcgctggtggcccccggcgagggaacgcagtgcattcatgatgtcgagttactgctggttgatcgactggaagtacggtgaagttggccacttgccagtgaggaggcaaaagttgcaatggctagtggttgggagtttatccgggtgtaggtctcgacgattgccctttggatacttacaggacgattttacaccctggaagcgtatctgttgaagaggtaacttgtgtgtaacatcgtttcagatggctacagtcggcgttgaccactgggaaagcagcacttgtggtacgtgacgtggtctccccgccttggtcaagttgttggttgcagctccgaccaatagatggagatgaaactctcgtgtcgaatttggagactcctgcaacactctgtcttctggacacccgaacgcctgccttgagttctgtggcaagtgagcgttagttcattccagtgcatcgtattcctggtggcatcttggtcagataaggcatgacgccaagggatggagtagctttcatgcattttgtgcctcggcgtcagctcattcgcatggacccgatggtgcttatggcgtttactcgattgccagagtttttatgctgaactctttttcctctggcaatatgaagagtggcatgaatcgagtgaccacgttagcgtatctgcacctcgaaaggctctgcaaaagtgaagcaccggaatgtgggcggatactcatgaggctgctactttttaaaagatttaatggcttggtgggacggtgtaattggatcagcttcacttcgcggtctagacttcctccctacacgtgctcagcttcagcttcagctcctgacggcgacttaacccccgagggcgttgcagcacggagcatacggactgcatcttcgaccgagatgcttgggttcccgccaagaagacgacccggcagattcgtggtcgacaggaggtcacgcaggtggcccttagcgtttgcaatagcgaagcgaaccttgcgcaccgccagcttctcctgcgtgtccgacaatacttggatcgtagttgcgtccaggtcgttcatgtggtacgcgtccagcaccacgccgtgcgtcgtgatgcccttcttcaggagtcgagccatctcgcgttcgatggctttggctacgcgctcgcagttggcgaagtacagcgaactctccacacgaacgacaacaatcccgtccaggtgacaagcatttggaaagaggtcccggtccacgaggctgccgttatccagctggccgagaatcacgaccggagagcgcttggtcttgatcatgagcgccagcacggagcagacgatggaggcgatgaggccctcgagcacgcccaggccgagcgtgagcacgaaggaggcggcccagacgaagaactcgtcgcgcttgacgcggaagagccacttggcctccttgaactcgacgagcgtgtagcctgcgacgatgatgatggaggcgagcgtggcccgcggcaggtagtagagcgtgcccgtgagcgtgtagagcgcgatgatgacgatgagcgtggtgacgatggaggcgagctgtgtgtgcgcgttctgcatgttgacggctgtgcgcgacatgccgccggtggggggcatggcctggaagatgccgcagacgacgctggcgacgccgatgcccgtgagctcctgctcggtgttgatgtcctcccccctctggatggcgaggcgcttggccatggcgatgctggagaggaagacgacgagcgagacggtgagcgcgttgacgaggatggtgccgaagcggccgccgtcgatgaggtcgtcgtcgaagccgtaccagggcaggacgggggcggggaatccgccgggcacggtgccggtgagcttgagcgccttgggtccgaggaggtatcccacgatgccgccgaagatgcagacgacgaggggtccgaggtcgcagagggtgcgcgcgaagaagatggcgatcagtacgggcttggacttgggcgtggagtcgtcgatggacttgcggttgagcgacttggcctggttctcgtctgcttgagcgcgggccgaagcgaggccgacgtactgctcgtccgtgatggagaatccgtgactgtcagcgaagttgccgctagcaggaatctgctgtgtattggcggagttggttttggccgggtcgtcgaagagctgcgagagcacaggcgaggggaagaagcgcttcttgatgagcttgacgccgatgaggtaggcgatggagatgagccccacggccagcgcgttcttgttggagtggccgatgttcttgaagttctggtagagcgtctgcacggggtagtcctgcgagtcgaacttgacgccaagcacgttctggaactgcgagagcatgatgagcagtccgccggccgagatgaatccgcccatgacgggtcgggagaagaagtcggcgacctggctgaggttgagcacgcgcacgagcagcaggatgacgccgctgaggaaggcgatcatgatgccggtggcgacgcgctccttctcgtcctcgatgggctcgaggatggatccggtgagcagcgcgacctcagagccgctggcgacggagagcacggtgctggagccgaagagcgcgtagatgagcggcgccgtggcggccgtgtagagtccgtggtgcgcgggcacgtgcatgatggtggagagcgagacctcttgcgggatgagcatcatggcgacggtgatgcctgcgacgaggtcgaacttgaggtcttgtccgagtttgtagttgcgcagccacttgagaatggggaggtagtgctgggcgagctcgaagggcgttttcttgggcgcgaggaagcgctcgttggtggggcgctggtggcccccggcgagggagcgaagccaactcatagtagtgattgagttcgtagatcgtgggagttggtagcccgcaaaagttacaatgaggtagggcaatggttgcgcagctcgagctcacttacgctagactcttatatatacttgtgggctttggtgaaacctacggggacaactctgatggcagcccgagcgattatagagaccactgcgatcgtgcggtaatgcggtacaatgcaacgaggcgatctttgctgcgcattcgtttacaggcgagcgcaacggatgtcggtatccgatatctcgaaaatgaaacggactcagttcagatgccttcagtgggtccccaccagttggaaagcagcgttggcaccacgcgactctggacgacattgctggagctcgtgcagattatcattggtcttttagacagtttcagtatcagcattggaatgacaataaaaagctaagaacatacacgcacgcttgccaactaccgatacaattctttaaaaactattaggtttatttcactgctagtattaataaatacatgtacacattttttcttgttttctattaattcaatatagtacttaaataaaattatatttctaatatatattagtatattcaaagcgaaatattcctttgatatttttaaatatcaaagtattctacattccgcttaaaagtggaatgtagaatacttcaacagttgaataaaccagggttactttaaatatgcttaccgaatactcgttgctttattgcagcatattctatagcaataccattcgtacaacagtaaatatcacataatttattgtacacaagtgatgtgcagtatcccagtatataataatttcgactcgtaagctattcttgctcgatacattcctgtcaaataggaacaagaatagttatgcttcactgagtaacctgcgaaaacgtggatgccaaggtgcttcgacgcaggctacctgggcattcatattggatagggtgctctccaatggcagtgcatgacctccctgggtattcgctagtgtccacattccttgagttatttctcagaaattgtacaaccgcgcggttcttctgcgttacctatccattggtgcagccctctgcgtttgtgtgtgcgaaagatccttgcccaccgttgcccaagtaaatgacagtctcttcaagctcgcctcgattggttttcctcttatcagagaccttcaacaagcgaacataaaaccgatggctccagtcgcgccgatcaagacatcgattccctgcttgaagactccaagcagaacccagaggagctcaggccgtcaacaagaggatgtgttgcccaccatgctcgcatgaacaatgcatgcagcagcaaattctggcggttctgtggcttcatttgctgtgtcttcatttctgaactcgcgctcaatcaccaagataccatggtcgctcgctactggatgctcgcggtgtttgcagctgctgtaggcacgctgctatctgtcgtcgatgctcgacccaacattctcgtcttcttcccggacgagctgcgcttcgactgggtcaacaacggcaccgacacggatttcttgcagacgcccaacatcgacagcatccgagagcgcggactccacttcaagcgcgccatcaccgcttcccctgtctgtgggccttcgcgcgcatgcttcgcagctgccagccactacgaagaagtgggggtgctcacgaaccgctacaacttccccatcaaccggatgacaacctactacaagctgctgcaggaggctgggtaccacacgatggcggtcggcaaactggacttgaacaagaacgacacgctcaacagcttcggctggaaccacgaaggcaacctccatgcggctgagtgggggttctccgacatggtcaactgcgtcggcgtcttcgagtcgtatttcttgacggatccgtaccccaacggctcgtacgtcgagccgtacacggactacctgcttgagcacaacgttacggacgttttcctcaacgacactcacgcccgcacggacggtggcaacaccaagatcggcgatcctcggttctacaaggacacgtacccgaatccgctgcccgacgatctctacaacgacaactgggtggctgagcaggcgctgcgtctgctcagtgaaaagcctgatgacaaggaatggttcatgatcgtcaactggaacggcccgcactaccccatgagtatcaccgagagcatgtacggccgaatgcggaaccgaagcttcccccaaccagtcgactacacgggcaacttcacggctgagatgcacaaccgcacgcgcgccgactacgccgcgatgatcgagaacatcgactcccacattggtcgcatcctctccgctgtgaacctcagcgagacgctcgttgtgtttgcgagtgaccacggtgagatgctgggcgaccgcggtctgtgggccaaggacgtcccgttccagccatcagtgaacgtcccgttggtgattgcgggcgatgtggtgaacgcctcgctgcaggggacgtcgacaaacgcgggtgtgtcgctcatcgacctcgctcggacgttcctggacgtcggtgaggtggaggatgtccctgctcagatgtcggaggcgcactccttccggtctttacttgagggtgtgccacatgaaaagcgcgtccttcgatcggcactaggcacgtggaagctgtggttcgacggccgctacaagtacgtgatcgggtacagcgacgacgagcccatgctttttgatgtggaaacggacccgcacgagcgctcgaacctcctgctgtccaccaatcctactgagctagcgcactatgcaagcatcatccagtggctgctgggcaagggcgacgtcgttgagtaggtaggactcctccttttgacgatgaacataacgatctagcagggaaatgattttgcttcatggggtctgcacttaatatctcattatttcgcgtgtactaagttttcatcaaactcatcacattgaccatttcgacgagtcatggcggcaaagtcatggtccagcatctcgacaacaacgacaatacttgctcgcattcactaggtcgacaccttgtccgtgcggcaaaaaagagttctctatgtttcaatgccgctcacttaaatgatgagcccaggaattcggaagtctccacttggtctccgtggagcaagtggacggtgcgcgactggccatcactggtggacaacttgctacaacacgcagcggatttgacaccgcagcattttcgggctggattggccgagcgatcgccaataaatgccctggagagcttcagctggagcttcagcgggcgcgtacgaggggcgtcgcgatccaagtggcggagaccttgaagccatcttagcagagcccatcccggtgtcaacgactaaaacaccggcgacttttactgcttcgaacgtggtacaaaacgtaatgttgtggtacatattcactgcgctgcatgggggacttgcatggcatggtgcagagtgcgcgaggagggctggcagtattgtttggagggtgaaaggagcgctcgcgcattgaactaccaagtgaaaatgcattctgcagcattaccgtgctatagctagctggtatcgagccaccttggcacttagaacacaccttatcccccatggtcgatgtgtcggtcttgctggccaacgaactgtcccgatgtactgtcgttcgacttgactcaagcgattttgctgttactcgcctgcacacccctctcaagactacgcgtaacatcatgctccaatataactcacgtggtgcaatgctcagagctcaagccgaggcagcagtcaacaactgaagtccattccaacatttgccgtcttgagctcacgtggccaaccaacaactttcaactcgtttaattcccaactctccacggattccacatcatgagttggcttcgctccctcgccgggggccaccagcgccccaccaacgagcgcttcctcgcgcccaagaaaacgcccttcgagctcgcccagcactacctccccattctcaagtggctgcgcaactacaaactcggacaagacctcaagttcgacctcgtcgcaggcatcaccgtcgccatgatgctcatcccgcaagaggtctcgctctccaccatcatgcacgtgcccgcgcaccacggactctacacggccgccacggcgccgctcatctacgcgctcttcggctccagcaccgtgctctccgtcgccagcggctctgaggtcgcgctgctcaccggatccatcctcgagcccatcgaggacgagaaggagcgcgtcgccaccggcatcatgatcgccttcctcagcggcgtcatcctgctgctcgtgcgcgtgctcaacctcagccaggtcgccgacttcttctcccgacccgtcatgggcggattcatctcggccggcggactgctcatcatgctctcgcagttccagaacgtgcttggcgtcaagttcgactcgcaggactaccccgtgcagacgctctaccagaacttcaagaacatcggccactccaacaagaacgcgctggccgtggggctcatctccatcgcctacctcatcggcgtcaagctcatcaagaagcgcttcttcccctcgcctgtgctctcgcagctcttcgacgacccggccaaaaccaactccgccaatacacagcagattcctgctagcggcaacttcgctgacagtcacggattctccatcacggacgagcagtacgtcggcctcgcttcggcccgcgctcaagcagacgagaaccaggccaagtcgctcaaccgcaagtccatcgacgactccacgcccaagtccaagcccgtactgatcgccatcttcttcgcgcgcaccctctgcgacctcggacccctcgtcgtctgcatcttcggcggcatcgtgggatacctcctcggacccaaggcgctcaagctcaccggcaccgtgcccggcggattccccgcccccgtcctgccctggtacggcttcgacgacgacctcatcgacggcggccgcttcggcaccatcctcgtcaacgcgctcaccgtctcgctcgtcgtcttcctctctagcatcgccatggccaagcgcctcgccatccagaggggggaggacatcaacaccgagcaggagctcacgggcatcggcgtcgccagcgtcgtctgcggcatcttccaggccatgccccccaccggcggcatgtcgcgcacagccgtcaacatgcagaacgcgcacacacagctcgcctccatcgtcaccacgctcatcgtcatcatcgcgctctacacgctcacgggcacgctctactacctgccgcgggccacgctcgcctccatcatcatcgtcgcaggctacacgctcgtcgagttcaaggaggccaagtggctcttccgcgtcaagcgcgacgagttcttcgtctgggccgcctccttcgtgctcacgctcggcctgggcgtgctcgagggcctcatcgcctccatcgtctgctccgtgctggcgctcatgatcaagaccaagcgctctccggtcgtgattctcggccagctggataacggcagcctcgtggaccgggacctctttccaaatgcttgtcacctggacgggattgttgtcgttcgtgtggagagttcgctgtacttcgccaactgcgagcgcgtagccaaagccatcgaacgcgagatggctcgactcctgaagaagggcatcacgacgcacggcgtggtgctggacgcgtaccacatgaacgacctggacgcaactacgatccaagtattgtcggacacgcaggagaagctggcggtgcgcaaggttcgcttcgctatcgccaacgccaagggccgactccacgacattctggcggcgaccaacctgcccaagcgcattcttggtggcgatccacgggtgtcggtggaagacgcgctgctcttgttgcgcgctttgccagtttcaggtaacacgtctccgtcgtctttaggggcgaccatcaatgtgccggtgtagggatgatgacctttcgctgcaggtgcagcatgcatagggaatgcgctacccatcgtaccgtagtctccacacagcgtttcgaagcgagaaacaaattgaatgatgaatcctttttgggtgtgttttctttcgctatgcaattactggaaagccggttaaatagttttagaattgtattaataataattgcccttacaaatggacatgtttcaactacgtcctgaaacaatcaattaaatggtaaaactagtagtggagcatctcagtcgcgttgctccgttgagttgcttagggggccgacaccctgcagtgtaatctcctctgcaggccgacgttcccgccctcccaatggatctaatgaagctattgattaattgggtctaagccatcacgtgcagatcggtgcagcttccgatccgacatcacgtcttcgattaggaacactattatcatagaactgcatgaagaactcgtcattgcatgtaagaagtgcattgcgagctttacatgctgggggttgcacgcaatagaaaactaactccgagttggggcaacgggtccgttcgctggaatgctcgtcgctgggcccgcctacgcaaataccgcgcgggtttgctgcggctacgctcctcgcaaccgcacactaccgcttccagtgctgactgcacgcgaacaggtcaatagtgctctggctggtgtaggcacaaacttgaagcgagagtctgtcgaatcttattctcttaaataaactgtaggagaccgagtcggacgctcccgtatataagcttgctgaccgtatcatcacagccgataaactgtagcattttagctaaagctgcacccatcgtcctgttgctgagccagattagcatttctctgtttggaaaatgccctctaaatcgtgtacctccggtttaatgacatacggtcactaaaacccgcatctttatgcagtgaaatctcaaatcctatccacgtcagaattctggaatgtcagtaaacacaggatttttggtcaaaaatggccctgggcgactcaatcagaatgtcagccctaacctgttccgtctaaactgatatcaggtaagtaaatgcagtatgaacccttgaaaaagctaagtataagtgagtgcatcaatgtaagtggggacttcgtccccaataaatataatcctggtcacaaccaaatggacttggcgaatgcaggagcagactccgtcaccaagcgtgggcggttcaagcaagcttgccacaaagcagacaagcggactcttctccaaagcagttcggcatgtacgccgacactgctggcagcagatgcaatgctagacgaacgcaatagcgaaactgaagaagacaattattttaccgaagacgacgaggtcagcagcgatcggggagaaagatccgataacgactcgggtcagcatctatttggcgtggagcagtgccttccggttaagattctagcactgggtcatgtggtaagtcatatctacgagctacttatggcaagtagcgaggctgtcgtggcggcagcacaggcgggaaggatcgagtggctggagaagttgctggacgagtacgactgcgacgtctccgaggcagctgtgagtactgcagctgcaaatgggcagattgaggcactgaaagtattgctgcctgaggtcgacggagactacgacggggaggtcgccgacgctatcaccgttgctgctgtgaaaggccatctcgatgatgtacagttcttgcttccttgggttgatgacgacgagaagcgtaatgatgctgcgtgggaagtattggaggaagcatcggctcatgggcattacgataccgtggaaattgcagcacagcaagcgaaagaggcgatgggcaatagtgagactgcgtactcagcgggggaaaggggttacgctctaactcgcgcgatttcaggtggatatgtggcgcgcttattactcagtcaaaacgaattccactggaatatagatgtagcattggagcaagtcgcagcgttgcgtgatctcagaatggtggaattgattcatcagatgtttccagaatttgtgaagtctagcgtgaagggtggtttcgtgacgcaggcacgaaaacgtgattcctggtggggggaggcgcagcggttaagaaacccccgctcagaacagtgctcggcgtctgaggacggtgggcggccgagaggtaaaagctgtggagctgccggacgctactgctcattcggcctttcgcctcaagcctcgcaagtagtccttactcctcacctctgccccctcccagctccagcctcgacctagtgccgatatcgcccccagcccacccacgcaccacctggcaacatcgtccgctcatccatccccgtcccgggccacgagcatcggcccggctacggtcgtgacggaaacaccggcccagcttcacaaccaccaggatcggagcccgctgaggcggatggcactcggccgaccccgtcctcgacttcgacaactccttgcgcgagcgcagaattcagaagcggaaagcagagggtgccgtacgctcggcggagcggaagaaaaaactcgcgtgaccggcgccttgcggtctagacgatctgctggcgtcgccgtcactttcgcccacatcagctaccgcgccacgggcaaaagcggctgtcaagcaaaacctgggcaccgccgctcgagcagcgaaacttgcccgagatgtgcaggcagtccagcgcgggggttcgaagtgcgccgcggactctggcgcggccggcgctgccccagcggtgcagcccggtacctcctccaagcaccaacacaaaagggactcaatcatctacctcgacagtccaccttcaccgggcgatgccggcgaacatgctgcgcggtcaccatcagcaggtccgtcgccatttgggtcgtctgcgccgccggcgaaaggacgagccagtgcacagacagctctctcgggatctcgcgagatcgacaccagcgacaactttgacttagcctcatttctttcgggcccacaggcagccagcggggccgcccccagtggattcccaggcggagccacgggtgacaacgccactgaacgtcttgcagctcaagtaggctctctcagcgccctggtcattgacatgagcaggcgtctggacgctgccgaagccaacccgactatgactctggcgccgccggcccgcccagagctacagccaatcatggttgacgggactcgtaccgtctcttggactgtacctgcgctccacacgagtgaattaccaccggcgcagttacgcgagctgcgatcgactagcttcccgtcgctcaatcagcggagccgcagcgagtttgtaccgcacgtcacgcacatccttgccgcctatagaagtatcgcaaacctgtctcgctccgacggtgcgttcacccccctaccgacacgctcctgtggattcgtcgcctcgccagcatccctttcgactcgagtattctggtctctacggcgtgcgcattggttctcaaggcctgtccctttccacttccgccctctgtcggacgacgagaggctcaagcgcagttcgaacaacaccaacttctcgctggactttagttcagcagctcaaccgccacagcccaccgagtgcacaacttacgacgatattctactcgcactcagcgggctcagctccttcggtgcaactcactggtacccgcacatgaatcgcctgctggatcaactccgtcgatttgtcttcgacaatcagagggccgacccggctaacacctcggaacgcgtgacacgcacgctgcagtatgcgaacgtctatcttggtcgcgctgtcgctcacctgtcggaagactcgctaacatggtggagggatttctgcgccgacaccgaggcaatcgagtacaggtcggtcgaatggctgctcgcgctgcagagtctcacagccacagcccaatctcaacctgctccactgcgcgcgcctccacaggccgggcaaccacggcgcgcgcaatacagccgccccaggctatgccagacaacatccgagccctggtgcctcgtcgttcagacggtacggagccatgcctgcgcttcttcggcggcggcatgtgcaccggaggtacccgagaccgctgcgcgtactcattccgcacgcacacgtgggatggtcctctacccagagacctagtaccgtacattaccaggcagtacggcaccacccgccgcggtcatcacggccctcgccgcccctgagggtgccgaggcgctaccggctcacaggcgcttcggaccccaacacttgataccattgccgctaatacaaacgccgcattgtttatcccctctacttctgagcccgtggatctgcttacgcacccacgtaacgtactaaacccaccacacagtgacactaccgtgcacctacatacgccgactcaccataatggtagtcaaaccaaatacaccttcccttctagaacgcactatgaaaccgcgatgcctcagatcgtatccaacctcaccgccaaccccggccaacaacacataacggcagatctgctatctcgataccctgcgcccaatccaacgtcctatgcggcctcactcgaaccgcgcgatcatcaggtcacgcacgcaccccatcatggcgcgcgcattgccgcatccacatccgctaggctacctcctagcgcagctacagaaacagcggatcgcccgtttccttgtatatctcaaccgctccgtgccccacccagcgcactccaagtgtagcaggtcctgtcccggggacggaggtgggccaatatatgagcaagtatacggggcaaggctgtggcgacggcgttcagcgcagtccacctatcactatcgaacagggacttcccaacggcggaatgggccggcggccgccagcagttccagctgcacaagctactacagagtgcggtacctgaatacgtacgccgcacccagtgctcacttcccaccctaatcgagctgctacgcgggcagacgacgtccgactaccgtcccaataaggatatcgttcctgccgtcatacagcaaagctgcagaacgtaccccaaactacataccctgctgcccattgtgcaggaagggattactgtgactctaacgtcaccaatgccccgccaaaccagccctccacgaaaccacccgtccgccaccaagagacttaatgtcctccgcaagaacatccggaaggagcaggacctcggccgctgcatcgtcgtcgaccgtgccgtcgcccaattctggcccgagctgttcttgagtcccttcggggtgatcgacaagggcaacggtgaccccgacgtagccggccgggtcatccacgacctatccttcccagagggggcgtccgtcaacgatcacaccgacgccgagtcagtgcccaccgccgagtacaagcactgcgcagctatcgctcgggagattctcgcccagaaagaacgctgtcccgggcgcagcatcaaaattctactaggggatgtggcagccgccttccgtaaccttggcacgcacagccattcagctcacctctttgccgggacgattcccgaagacgacgccctcgtcatcgacctctcgacctgtttcggctggacaggatcaccgggattctacggagtcatcggcgatgcgatcgcccacatccacggcacaacctcaaacgcgtattacccaaacgggtttttcaactatcactgggtcgatgaccacgtctgcagcaatgcagacgtcgggtcaaactgaacagacgtggagcagtcacttcgatcagccatgaccctcatcctgggcctggacgcagtcaacgacgacaaattcactccctgggcaacatcccagaaggtcctgggcctggtattcaacaccatcgctggtacagtttcgattccagctgacaagatcgtcaaagcccgcgctctcgtcaccgacgcctacaatacgcgcgctctaagccgcaatcagtatcgatctctcctgggctcctttcgtcacgtcacgacttgcatccgaccggccaaggcgtttctccaacgcctacgcgcggcagaatccaaactataccgatggacttcggtccctatgacacctcacatgcgagaggaccttgcttggtggagaatcatcctcaactcacccaccctcaatggcgtccccctagaatacttccgtcacagccctccttccgactttacaattgaaatggatgcatccgacacgggcctatgcgcccttgaccgtgcccactgccgggtactctcttaccggttctccgagaccgaactagacctcatccgagtctttaacgccgacgcatgcaacgagtttgacatcaactatcgcgagctactctcgtgtgcttttttttgccgtacacgcatgggcaccggcgtggcgagtcaagagaatggagacccctcacacggccccgtgcactttcgcatcgataacacgtctgcggtggcgtggcaaaacaaaatgtcctcctcgaacactcgagcgcaaacgaccatacgtctactgagctactgggaaatgcactttggcctgagattatcatcttcgcacatacccggcgccgataacgtcatagcggatgctggcgctcggctttccaaagaccaccgtgcccacaccacctttactaaccttacatatgcctggtcacagacttagcctaagacagacattaatggtctggaacggatctggcaagatatctccgcgagcattcggtggcagactcaacctaccggaaatatgaacgagcgttcggcacatggcaagcgttcatcacccgccgcggggtgaatccgtggctcagcggcgtcccagtggcggcgcaagtccaacacgtatccgatttcagggttccagcagggctatggatcaggccggccggtccgtagcgccacgatcgcgaacaacttgatgggagtccgccacttcttccaggcgtcgagacaacacttcccagttgaccatccacaggtccgcatgctcctcaaaggcatcagccgcctggatagcccaccagagcgcaaggctcccgtgtcgatccagctgctggaggcgtgcttcgcgtccctcaaccttgcttccttctcggaccaagccttatgggggttctgtgtctggcgttctttttcctgcttcggaggtcggagataacatccatcagcggggctggtttgcgctgaaagctcaggacgtggccgtcttcgaccgagctgacaacgctaccctggacgcgagcgcagcaacaacagtgcacatcaggctccgcggatccaaaaccaaccaggcagggcaagcgacaactcgcatgctacgacgctcaggtcatcgcttcttgtatccggcccgaggggcgctccttctcctacgatcgcggcgatcactgccagccgaactgccggcggccatgtacatgtcccgctcgggggagcccagctcaatatcggcgcggcaggtggcgaacacagtccaggacgcggcaagacgcatcggatgcgacccacacgagtacagcacacactcgctccggtcgggaggggccacacacatgtaccacgccggcgtggacgccctgatcatccggttttatggccgttgggcatcggacaccttcaacatatacactcggctctgccgggaatcggtatctcgtctagccgcaagcatggtaagtggggtgaaatctgcaacaactctccagtgacggccccagcgaccgccttacttggggggggggggggggggggggaggggggctcagccacgcccaacttggacaaggctgcggccggcgctgctagccaccacctcaataaagttgcagatttgccccaacgtcactgtgccgactgatgtaaaggaaaccataaaactcgcagattcatgttgaaatcgcactaaaacgctactaccctccctgaataaaatgtgtgtatttattgtgaaaaccgattagaatgtcttattggattgttaatccgccgatttagtggcttaataagacctacgaccccccatttgttaaatccgacctcctaattagactggggtacctcgatttatactcaagattattacctaggacgacttacagagtcagagcatacgagtcggatttacatttggtaatcgaccgattaagccagggccggccgatttgcttgccattcagacgaaatgtccgatgtgcaaccggcattcgctctttgtaggctaaatcagccgccagacaagaatcgttgcagtcgctcttggctaggtagtcaaggctacaacactaacatcagaactaagcaggaaaagccgcacgctataatacacgtaactgagatatgcaggcgacgcgtttaagcgcggtgttgtcgctgcacttggcgagtctcgggccgagggcacatgcatgttgatcgaaattgctaggctgcacataattacgagaccgatgagcgatttatactccgattataattgagacatccccaatttattagtcttcaaatccgctatgagcgatgtttaaccggctaattcagcaggacagaccaatcggttttcacaatagtttttgtcttggtaaagctgaagtcatatgcaaaaggaaaagtaagtttcttcagcagctctggacgaaagcagtctcagttgctactggctcttggacagcagcgtggtcacctcctccagcagacgaatgcggtcagctttcgtcggaagtcggatggcaaaagctgcgaactgagggcagcgagtgcagaaaaccacttcgggcacgggcctgcggcatagccggtaaatcgcatacagtacccaaaacgcaagtagcgcgccaccaccgccatagtaggcgtcacaatcgacgcatctaccatcgtcgttgtagtagtatgacctcgagtaccgcgtctcctgcaatctcccaatcaccaaaagggtggcaccagccgcaggagacccaacgagcaggagaaagttggcgagtttcttcagccagctttcagcaacgcggccgtagttgtccacagcaacttcgcacacgtccttgaggaagacctggcgtaacaatgacgccgtcttgaagcagcagttcttccgataggtctcgaagtagttggtgcggcgattcgtgagctggatgcgtcgaatttggccctcccgacagaagttgttgcagacaggggtctccgcggactcggcgacaatcttctctccttcgagtagtcgggtcttgagcagcgatttttcggcattgacgacaacaggaacctggttagcgcttaccggagcctggttgtggaagcttcttggttgagggagtaggtggggctttcgaggaaaaaaaaatgaagtgattggccgtgtgcaaggcatgcacgaacactcctacttctttcaacgaacggttaaccgctgagatactacgatgagaccatacgttcagctaattgcgtaaagtcgcagtcgccttgttcaagaagaagaaaaagttgattaactagatagtggacatgcggtttcgctagctacggtaagttatggtaatatctacttggacaactgaattatggccgcggaatccaaattcgacaaccctgttggggtaaactaattggtttgggtgcatcaaacccaagtcgttgaagcaccgagtttattgcatcaccgtccagtttcagctcttcagaatgctggaacatgtattgacaatgtcggcgaaatgagctcaccaaaccttgagtgcttggttgctctattgctgcttcctcaaaatggatatcgttgcgtagacgccatgtagcatggaacacaattgctatgtgaactctccatagcagcaaaatggttttatgttgttgcttccaatctgctttgatgtcccgtggctgcggaaaaagcagtagccttcagcttaacgcggcgtggaacgccttgctccatcgcgcccacagtgattgccacatatcgttcaagccggggcttagtcgccttgttcaaggctatcaggaatagacggaggactccttggtatctcgtttatctataaaccgatcagatctctgtgagtgaatagagcaataacaactgtgatacgccgcctccccaacattgaccgccccagtcaggagttgtcggtccataatatcttttggacttcatcatgatgtagattatgtttctacattttaaacgaaacttgcacaaccgagctagacgattaactacatcggcgatgcacagatacatgtgtacaagggattaacgtccccaagcaggattctatatctattgtatggcgaacattcgtaggatgttcgggttaccggatacggcgagagaagtttcgaaacctctagtattcttagggcagtttagatgagatcccgagaacgagaagcatctctctagctcccatgggacactcacttttcaatcctcctcgtcttagtaccccgcctcaccatcatactcaaggctggtcgaaagtcaatcagtgaacattcctcgatgttttagaaacgggactggggtggcaaccacgataatgaccgcagttgacgcaactcgatctagcaaataaaactataataggacttctaggccacatgaagcttgaactagaagaatcaaaatacaaacttacttttagggtgaggaactactgtgcacatgttgtacagtcgttgcacacgtttgacatcgcgataattacgtagctgcacgtattcgccgtccaacaccgggtcgtgcaacaaaagggtcatgcctctcagccaaaatttgacggccaacttcatcgtctcgacatcggggacccccatttgggctgcaagtatggcgtatggcagcccaactacgacgaacaaccaagcagaatacaacgggctgctcaccggcctggtatacgcacacagggcgaacattgacccgctatttgttgtcggggatagtcagctcatcattcggcagcagcggactcgcgccgaaccacgagcgcatcatttgcgtcaactttatatgcgatgcagagtgctggcagacaagtgcaaggtagtcaagtggacacatcaactcagggcatttaacaagacagcggactcgctaaccaacttggctatggacaccgctcgcagcagacaagtgatattttctccagaaactacggatgatcacttccacacggtagtgatgcgatacgctgctagtgatctacgcaaatggctggatgattgtgcagaagatcgcagataaaacttttccgggttggtccaccgcataaacggaccgaagacctgccagcgacggaaacgggcgtaggtaggaggtgtgattagaggtcgtaagtgacaacaacacatctaataattaaaaaaaaacttcatcgtctcggagcacaaacagagcatcgtaaaacacatcatttcccaaaattctatcaaatactaaatatttttttataagaaagcccttaaccccctaaagcaaatctggatctgcgatactaactaaccagagggaagtatatttgaatgcagtcgtgctgtaactaaggtttgcgttgcttagccttgagtagccacgaattgacgcaaactgttggccacacttacctaacaaacctcttctccacacgcccgtagcagctgcatttaatatagcttgcgcccagagcttaaaacgtaagtggccacaatgtccctgaatcaattgtgcccttacatttcgagatttatagaatcaatgattggcaccaacgacttgtcctcatcttgcttactcatgagtatcttgcggcttattcaattcaccaaaccgtattctatataaaaattgtacgttttcataaacttctgtacttcgcaaaaatcttcttttaccgatactaaatttcagagcttcttcctggacgcgcgattgtagtcatgagcatcttgcagcttatttagttcagcaaacgcaacttaataaaacatgtccatgcagaaggtaaagattaaacgcgaatgcaactgaaagttgagagattgggattttgggtgtttattttgcaccaatgctgcgtctccgctccgctctcattggttattggacaacagcgtggtcacctcctccagcagctgaatacggtcggtcttcttctgaagtcgaacggcaaataccgaggactgggggcagcgagtaccgaaaaccacatcgggtaccgactttcggattggtgagctggatgcgtcgaatacggccccctcgacaatagccactccacactggggtctctgcaaattcagcgacaatcttctctccttcgagcagccaggtcttgagtagcgatttctcggtgttggctgcgactggaactacgttaatgtcgaccatcttgaaattttctcgatagggaggaaggctggcaattgcgtgctgagtgtatggcctgttgtattttaacacattaaaatgtcttcctgttgaagataatacattctgggaaaagctagggagcgccgaaagcggagcaccggagcagagaaagaccgtgcatacgatggcagtaacaccacatgaatgatttgacttcagcgcaagatcgagataaagatacgtgtatgtattttagaatacagatcaaagtgcaccttaaagtcaaagcggtcattcgtctagtgctcgcagtccggcataaccccacgtacggggcggacagaatacctgctggaactcggtatcatcgcagtcgagaagggcttgaaaggacgatagttgcgctgggattcttgttgcggctgcttggtcttgggcaatgatttcgaatctggaaggcttgcggcgtgtactgtgaatgccgtatccgactcggtgggggtcatgttgggtttgttgtcatccactgcggagggaggcaggctctatgatgcgtggaggtgcactcttgagagccgatggcagccaccagtggcgatcaaagtgcagtggctccagctttagcagaccttcagagtcgatgatacgcatgagctcatgcaggcaaggacggccatggattcttcgaaatgtccacttctttctagcccatggacaacaattttatgagcctgatcaaacttcgccatgaaaatgtcggtcgccagcaagttcgttttcttcttccccatagcgacagcgtttcgaacagcagtacgcgatcaagagtctctgggcaacatgtcgtatgacttctttttttacttttgaatctgaatggtaaaattgtgatgggtttgcccagctaatttcaccatagtagggtccgtcatgaaaagattggtgtactgaacagtggtaaattgcttgtgtggagcggtaagtatgcatgtacctgcgtgcttccacaccacgcaatcgatgtggtgttcagtaataaccatagatttggcgcacactttcgttgagtttgcttccaggacagctggcgggacttggctgcttggatcaagcaagggcgagaacttgtccgcaatggtgtttattatcgccacctgtattcacgcttcagttatcacagggacacctgagaaccacagctgaggagaagaagaagaagaagaatgttcgattaccgattatttgtcttctcaacttgcttagtagatgctaactgtatgttgtgaactaatcgactagcgtctcaaagacgatacctgttcgatgattcagatgtagttggacgtggcgtattcggaatgtgtcggggtggcgtcgatggaaatctccaaaagaactgctttcagccagcttcgtaatgatcttcttgagtatctgttgtttaggcttctccgcacgtctcaacaggcgacggtagtgcatcttgctggctgccgcagcatcaatcctgacaaacgcttgcactcggtcctccgtcgaccttcatcaggtaatcccaccccgccacctcgaccgcattcgccgccgtcattggcgagcacggaagcctccgaagcattactgtactcggcgcgtgtcctagtcgcattagtcgtctgcggtggccacgtctctccgcgcggggctgaagcggagctgagaccgaccacctcgaatcgatccaggacacgcagacccattccagcttttgcggcgcgcagctcaagtccaagtccaccgcagactgatcccaagcgatggcgtcgtgcgtccgccgactcacgggccaccgcgagagcgagcgcttcgcgctgcccaagaggacgtgggggcagcagctgcagcactacgcgccgatcttccgctagctgccgcgctacaacgtggccaaggacctcaagttcgacgtggtggctggcatcacggtggccatgatgctcatcccgcaggaggtgtcgctgtcgacgatcatgaacgtgccggcccaccacggactctacacggccgccacggcgccgctggtgtacgccatcttcggctccagcacggtactgtcggtctctagcggttccgaggtgtcgctgctggtcggcaccatcctggaggacattgacgacgaggacgagcgcgtggccacgggcatcatgatggccttcctcagtggctgcatcctgctgctcgtgcgcgttttgaatctgagccagctcgccgacttcttctcgcggccggtcatgggcggcttcgtgtcggccggagggatcctcatcatgctgtcgcagttctccaacgccttagacatcaagttcccgtcgcaggactacccgccgcagacggtgtaccagatcttcaagcacatcggcaaaaccaacttgacggcgttcgcggtggccgccatctcgatcgcgtactgctcggagtcaagatcttcaagaagcgcttcgtcccgtcccctgtattgatgcagctcttcgagccggacaagccgaccaaggacgacgctcaagtcaagtccgaggacatcgagcagatccagacgcccgtaatgaacaacgaggtctcgcacagtcatggcttctccctcacggaccagcagtacgtgagcatggagacttcgctccaccgtcgcggtgactacactccagtgaccgaagctgcagagaagaacctggcggatgaagccccaaagaagtccaccactaggctccttgggatcttcatcgtacggacgatttgtgacctgggccccctggtggtgtgcattgttggaggtataatcggtagggcgcttggctcatcgcgcctgaagctcacgggttcgatccccggcggattccccgaccctaaggtgccctggtatggcttcgactcgggcctcattgacggcgaccgcttcggaacgatcctgtacaactcgctgactgtggtcgtcgtcgtgttcctgtcaagtatcgccatggccaagcgtctagccattcagcgtggcgaagacatcaactgcgaccaggagctcacgggcctgggtatcgccagcgtcgtgtgcggcttctaccaggccatgccccccacgggtggcatgtcccgcacagccgtgaacctgctcaacgcgcacacgcagctctcgtcgatcatcactactctgatcgtcatcctcgcgctgtacacgctgaccggcgcaatggcgtacctcccgagcgccacgctcgcctcgatcatcatcgtcgccggctactcgcttgtcgagttcaaggaggccagtggctctaccgcgtcaagcgcgacgagttcgttgtgtggacggcgtccttcatcctcacgctgggtctgggcgtgctggacagccttatcgcgtccatcgtctgccccgtgctggcgctcatgtggaagaccaagacgtcgcccgtggtgatcctcggagagctcgacaacggccgattcgtggaccgcgagctgttctccgaggcgcacgacctgggcgacgtcatcgccatccgcgtcgacagctcgctctacttcgccaactgcgagcgcgtggctctcttcgctgagcgcgagatggttcgtcttcaggcgcacggtgtcaccacgcgcggggttgtgctggacatgcaacatgaacgacctggacgccacgacgatccaggtggtcaggagaagctggcggtgcgcggcgtgagcttcgccatcgcgaacgccaagagccgcctgcacgacatcgtggcgtctacgatatcatcaagcgcatcctggccaaggaccccagcatctcggtcgaagaggccgtgcgcatgctgcacgatctaccgacgtcgggccacacttctccatcctccatgtcccgactgtcgacggtgtaggacaaggtgtaagcagccagtgcatcctctgtagataaaaccaatgaacttatccatttcgtatacaagcatactcgtttcatccgcacgactgcagtacatgtacattatcaacgtggcagtaacctttgaagtctatcctgcgctgggcggagtgctgatgtctgagccgcagtccttgcatctcgtggcggctcccttcacgaactccttgcagtacgggcactgcttcttcacgcccaccttgagcttgaacacgaactcgagtgctgttgcgcaaaacggcacaacatcattgtaagcgcccctgaccacatccatcgtttttattttacgcacctttcttcacagcaaagaagaggaagagagcgttgatgacgaagttcatgatgttctcaaagaacagcccatagttgatggttacggcgccggcgtcccgggctacaagtcaacggagcaagttggacgtccaccctatttgaaattaaaaaataaaacaatctgtccccttaccttccttccaagtttgccacgagtcactggagcactcgggtgtagtcgttggtcatcgcaacggccagtagtggtttgcgattcctcgagctacacacaagtcaaactcccagttagtactaagcctatcaatggtaatgtcacgttcgccttacctgtgaagaggctgatgatcggcgctagaatgtccgtgaccaaggagttgaggatggcggagatggacgagcccaggatgagacccaccgccatgttgagcatgttgccctgctggatgaactcctggaagtcggtgaggagagcacgagtcgtcacgatctcccggttcgccagctcttgcacggtcttgcactcgatcgagcagcgagatattctccggcgggggtggcgggggtgcagcgaacggattccagcgcatggtagtggacaactaaggactaaagacggatgagctcaaggcagagcgggagtccaagtgaatgaacttcagactcgctggtctccacaattaaggggatgagcgagcggcagaggatcagattcgtcgacaggtgtcgtacttaacgaaaatgcagccatgtttaaccccttggttcccaacgtcgtaagttacgactttgcgttttggcgactttgcgttttggcaaagtcgtataatacgacattgaggaagctacaaaagcaaatggctcggccaatacttaaagcaagtcatttccaaaaaataagatgcaagaggtaagatagacaaattcaaagacaggtcagcgggaatgagagacgcgcgatgggatccggagtcattctagaacttgccggatggcgcgcattcgtacaagtcgtcgtgggaagactgcggccgtcgctgcggtcgcacgggagatcgacttcgggcatttctggcgccagctccgcgccgtagactggaccgcgaaacgtccaagagggattcaaaaggactggagctacgtaagctccgatggcgctactgtgcttgtaggcgaggacgcagtcgttcagcatgcgatctagtccggactattaggcagcagcacgaatgacgacaacgaaagcaagagcgaaaaaggcaccgctgctgacgtcgacggccaaggggatgaagatatccgtgcgtcgcagatcgacacgactgcccagctctctcagcacactctggacgcgttgtttgaagcccccagtcagccaaacgttgagctctcccagaccgctgtgtcccgggcatttgatttgtccccgagtacgctgttgtcggatgacatagagcaagttgcggctacaggagatcggcgagcgggcgtaacgagtgagcaagaggcaaggcaggccccagcacaatcagcagggcgagtgttacgaccccgcgtccaagtgaagcaggacatcaacatcgttcctgaagacgagcgtatgagtgactatgagagctttagcaccgaagagagtgagggagaagacgccattgatgatgacgatgactgcagtgctgctagtgacgacgaggagactatgtctgaagacgacgctgtacagttggatgaagcgtttatcgcatcgcttctaattggtaataactctcttaccaaaaaagaagctgagcagcgagcagcggcacaacgtgccaagaagtggacttctgcgtcgtcggcgttcgaggatggcgtgaccccctacccaggcttgcagatggaagaagcccgtcccgttgctgagctgcgtgttctttgccactcgcccctacttacattcttctacttcatgccgaagtcgttgcgagtcacgataaccgaggagacgaacgagtacaacaagcagcaactggaccagcgcgctgaagctattctagctaagcaaggtatccgagttagcgggcgtcctcgcaaaacgttggctcagattcgtcggcgcttaaagtcaagtccgctgtatgagacccacaagatattgcacgtcgttgggcttctcattgcccgtatgctctgcccgcagcggcgtcgttttgctgatcactggtcgatgactgaagatggcgctattccggcagggacgttcggtcggtttatggggcgtaatcggtgtcaaagcatcttacgcgacttgcactttgtcgacaacaaggccactcgcacacgtgacaaactatgaaagcttcgcccagttgtgaacaagctgcagcagcagtttttagccgcatggacgctcccggctgtgttttcctttgacgaaggcgtgcttccttcgacctcaaagcgcaatacgactcgaatgttcatgagacaaaccccatcgttatggttctaaaatgttcatgctgtgcgattcaagaactgcgtattgccacaggtatgttataatatctttgcacactcctctgtatttactatttgttcctaacgtgtacatctgtatgtcgtaacgttctagttttgaaatttatgcgggcaagcgcagctctagtgacggtggtgcaagcgcattcgatcacaaaactggagctgccgccgtcgttcgaaatctgaagatagtgctcgacagcaatgcacgacacgcttggcacctagtcgtcgtcgaccgcttctattcctccattcttctggcgatcgagctgcttgctatgggcgtgtacgtgatcggaactatcatgattgaccgtctcggactggaccaaaacatcgtagagaagcggaagtcgcgaccagcgtttattcctcgcggcacgttcacgttctcgcgctcggtcgcagttccaagcatggtagcgcttcactggtgggaccgcaagccggtacactatctgtgcacgggatcagcgatgacagcttcgacaatcgaccgcaacgtcaagcaagtgggccccattacggtgccgtgtccggcggccgtgaacgactaccagcgctggatgggtggcgtagatgtgaatgatcaactgcgcctacaaaagttctcgctgcagaaatctaccaagttcagaaagtattacaagagcttgtttttgggcttcgtggctctagccttggtgaacgcctacattttgcacaaggaagcagcacgacttgacggggctgtgccgctgaaacgcggtgagttttttggcgtattgcagaaccaacttttgcagctcaaagccgatgattttgacggcgtggatgcttcgccgctaccaagcagccaaaagcgcagacgtggaccggttcgcctcacgcatgcgctggagcaatccgaagactgggtgaccgtcagcggtgttcaaaagcgtcggcagcgctcatgtaaggtgtgctctctcctgcgtacaaatggaaagaagaagtcgttcgctaccacgtacttctgcgagcgttgctctgtcgacgacgccaaatgctggctgtgcaacaagatccgtcgtgaatacaagggtgaggaaaagacatggtgccagtccttccagggcagtaatgatagccatcgttgatgcgtgttagttttggctggattgtgatggcaattttcttgaagtcttgcatcttttgccttgtctttttccttgagtctggattcactgtacagagttgtgcagccaaaaggggtaagttacaacattgtgaagatgccgagacaccggaagtcgtaagacttacgacattgcgagagagaacctgcgcaaaactaatgcacccaggattatgcacagcatacaaattcccagtgaaaaaacaaagtcgtaagatacgacatagagtaccgtagttaatgtgttttgggtcctgaattccgggaaccaaggggttaaacattgttgaggtctgctaggtgctcgttgcagctttggtctcggtaggcgccaccttgagtcctttcttgatgagatccgccttcatcagtttatttaagccttgaacgaccatcatcgctgcagagatccaagtcatgtataacagtcagtgatcaagttcagctcgaaaccagcaggtggagggggcgtacctcgtttgaccgcaaagtagagaaagatggcattgatgaagaagcgcacgacgttctcgatgaagagtccatagttgacagtgatagctccgtggtcgcgagccatttgaggggtctcccacgtagcactgctgcagtctttgcggtcgttggggcaccttgccacggcgtagtagtttgccaagctgcgcgtcgacacgagactgaggatcggcgacagaatgtccaccaccagagactggaggatcgccgtgaacgacgtgcccatgatcataccgatggccaggtcgacgatattaccgcgctggatgaaccccttgaagtcggccacgagcgcgtgcagctcgtcttgcggcgagatcgactggatgtggttcgtcactttgtccatcaacttctcgacgtcatccgccgatatggagacgcgcttggggtcatctaccgcagtcgcgttcagctttgactgaggggcggggacagtctccattccgtcccaaagctctgcaaactggggcatctcaacctcatcaccttctccatttccactcacgtaactccgctatttccagacccagcagctcaatttggcgccacgctcgacgttcagttttcagtcacttcattattacaacgacatttaactcgactgccttggaccccccattctagatgctgtgcacccgagtggcacgcgccaaagcttgactctcatccgaaggcatgtcttcctcgcggatggcggtgatggcctcggtgaacccgatccgagcatcgctgtgcacgatacccacgaggaactcggacgtctcaagtagatgctgcaggcggtctcgtgcgttcacgatcgccagcatgatgccttgtccgcgaagctcggccttcaaatgcttcatcatctggatggtcgtggtatcccagtccatgatggagcctgcatcaatcaccacaccacggactcgcacgccctcggtctcgtggcgcctgcgcacctcccgttccaccacgcgctcaatgtattcgcagttagcgaagtacagagcgccttccactcgaatcgccacgatatcagacaacggatgcgccgtgtcggggtacaagtccaactctacgatccgcttccccccggtttcctcgtcgataacctcacccagcatggacacggtcgggcgacgagtcttgtaaatcacagcaatcagcgagcaaaagatggaggacagaagtccaggcagcacacccagcagacacgacagcacaaatgacgccagccacacataaaattcgtcgcgcttgacacgatacagccatttggcttccttcatctcgatcagtgagtagccagcgacgatgatgatggaagcgagacttgccttcggtaggtacgcgagagctgaagtggatgtgtacagcacaaacaccacgaccagcactcgcaagctgtgtgcgggcgttctgcatgttcaccgcagtacgcgaaagacctccggtggacggcataccctggaaaaaagacccaacgaggttggagaaacccagcgcgatgagcctttggttcggcctgatcctgtagccttctttaatcgcgagacgcttggccatggcgacactgcacatgtacgagatgatggcaatcgacagcgtgtcgatgaagaggtggtacagacgatcagcctcgataatgttcgtactcaatccataccagggccttagcggcgatggataaccaccggggacatccccggcaagagcaagagaaccttctggggccaagtagccaacgattccacccagcagacacaccatgaacgcacccaagtcgcacaccaaccgcagcgcgatcagcacagccatcttcgagcgcaatatgcgaattgacgtcgacgacgctgcaaggatgcgtccagtaagcgccgtagtcgaagtcgccgattccgacccagtctctgacttcgcaggcgaagcaagctccttcacacgtctcttcatttcagcctcagccttggcatctgcgttatcgtcgtcatcagtatctccgccacggttgcgcccgggtctctccaccttaggctgggttgggtgcatcctaggcaaagtccgcgctcatccgagctagaacggtgcatcccagcagcagcatcagggggagtgccaaagtccaacggtctctcaatagtaatgtaatcctcgtccgaaagcgaaaagcccacaccttcgtcgtccatgcgtccatgacgagtgctacgagtaatcgcagccaggtctctctgacgagtagagcgagccagatccaggtcgttagcaccaagatctcgactattgcgtgacgatgaggcccatggggacgacaccatgaagtcccgacgtcgcagcgagcccgtcgtggacacagcgggcaagtcggcccacctcgatccacgcggcgataccgtcacgtcttccacgtccaagttggcttcatcatcgctcctctttggctggcgtttctttggcttgggggcgtcccccagttcgatatctccaccatagctgccctccgcttgtcgatcatccttggcgtcctgactgtcctcctcttcgtcctcactcatgtcactctgctcgccgttcgagctcatgctcatggacagttgattcagcgccctggacgtctcaatcgcgaactggtcctcgaactcctcctcgactctagccagcttcctcaccacgcggcgtttcagctcgtgcatgcccaccagcaccaagattgaaaaggtaccgagtgcaaagctgaaggtgttgaggtgtggcaactgctccatcagatcccacaccgtcagcaccggcagatccttgctcttgatgtcgatccccagccacagattcatctgggacagcatgatgagtacacctccggccgagatgaatccacccatgacgggccttgagaagaagtcggcgatgactcccagtcggaacatccccatgaacagcagcaccacgccactcaggaagctcaggagaataccggtagcgatccgttcctcctcactctccaccttcttgatggccgagcccacgagtagactcacttcagctccgttggccacactcagcacccgggaggtgccgaagagcgggtagatcatgggtacaaccgcggccgtgtatagcccgtagatggggggtacgcccatgatggctgcaagggatacctcctggggtacgagcatgagcccgaccgtaaccccggacaccacgtcgaactgcaggtcctcactcaggtcgtacgccggtagccattctaagatgggtacatgttgcttgaggaagaagagtaacctctgccgggttacgttctgcctcgcctcgcacgcggatgcccagagcgacgccagcgccgaggttacgcacgcgaacgagagctcgctggagccgggggacggcggagaagaagaagaagacgccatacagagcgccccacctgggcgaagaactggcagcgcaggagtgagatctgccgctgtcggagcactgacgtgtctgttggctgtctctttcggtaaggaaccagttgacttgctttttgtatggggcatcatgctgcaaatcgttacatctggagcaaccaatggtacagtgtacctttcactaccaacatggctacactcttttccgccgctctacgccagatcaaggccgcgcgcagccgtccgagcccatggccaacgtcagcatcaagcaggagtgcgtacagaccaacggggctcaggccaacggcgcagcgggcgacgccgtagcgcaagcggtgagactgatatgcatccatcactttgacatgacatgcgtgttatcactaatactactgcacctgcattagctatcagcggcgtaccaggcggcggtgcccgacgacgagaaggaccgcaccaacctgctgctgacccacgcgtgcagctgcgacgacgcgcagtgccgacaccccgagttccgtgcgctttgctcgcacatgaagcgcttcctgcgcgcggcctgctgggcgtctcacagtgaacgctggcggtcgtaccccatcgccacggcggtcgtcgagctgttcacgtaccacgcgctgcactgccaggcgctgcagtgcgatgtacccatgtgtcgccagctacgaggccaagtgctgctttaaaatatccttctcttcttcttatctcgacaaacatggctacatttgtggaatgatgtgttggctaattgtgaccgagctggtgtttgttattattgtaggataagtagtatttggccggacacccgacccctatgcaaagcttgccacctcgctgaagccaatcagtgatttttttcttaccgtttgatgcttaattacctattttcatctaatcgtcgctcattagggttaggtttattccattcctacttatttctggaatcgtccggaatttcctgcttcgcgcaaataagtaatcatacaaaactaaagatgtttctcgttcttactcgataagtgctatacctgccggatgtagccacattcagacttgcccaagactgacagcgagcttctcgtggtctcgacaaccgtcgctggaagttcaaggccgactccaacacgcaaaccgctgtgccgagtgaacgaaaggcagaataagctcagtagataactaatgtcctagatgatcatcgaacttccgagttttgcaaaattctgtagtctctactgggtctagctacgcattggtcgtcccgaccgtccacgttgggctgccttgccgccgcatctacttcagcgtcttccccgctcggactgcgcggcacagcacagcacccgggtgtgtatgatgccgaggccagcgtctcgtgtagtccagcccactccgcgcgcgcctgctcctcctctgtgacttgtcctccagccccccccccctcaccctcctgcacgtacagccccttgaccttgtgctccagctgtgccagcagctcctgctcttggcgggaaggcgccacctcgatggaaagcttccttgaccttgctctcgaacttcacgtgcttcttcgtcgtgactgttgtgatgcgggtcgcgtcatcgctccgacctcgctgctcaccgccttcgccggcaccgtctccttcgtctcggacggcggacgccgcttggagcgggtggtggtcctcagtcggccgcacttcactcaacgcgcagccccgcttgtcgccgtatgcgcctcgagcttctccgtctcctcttcctccttctcacgtgcctaatctttgcccggcaccaccgccccgtgcgcgcactactcctgcagcgcctcctgcctcacatcgcgctcgctatgcgctgcctgcgcatcggcatctgccgcgtcgcctccatggcgtacagctcggcctcgacggagaggctcctagggccgcacggcgtcactcagcgcctcgaagcgactgagcatccactcgtcgcgcccgcctcctccttatgctcgcgcggtcacgtccagctcgcccgctggagcgcctcctgacggcacggcgctctgctcgttcctcctcgcgatcacgctgaagctgtggccaccgccgatcaccgctttcgtgtcgccgtggtggggcacaacagcatctacgcccacggcgcaccgtgacctgtcctcttcctcgcgctccagtcctccgccatgcactcctagccgcctgccatccgtccctgcgtcgtgcttaaaaatactgaaccgagatgtttacaaattgtaaattacaatagcccgattttcatacctttctatcgctgtccggaatgaataagtgggcctgattggcacaagtgattttatgtttcgccagtgtgtctctattgcaggtttgacaggtttccggattccggtccggaatctggcaattactgtcgttgcgtatcacattgtctgttggtatttctgctgcttaaaatactcgctcgtactaactacagcgcatttgatcagggaacgagtatcagcagtgcaagcgggttggctagcagggcgcatggatccccgtgtctctactgcttcaggcccgaaggccaaacggtggtccaagaaccctggatcgtcgcatctgctgcgaaatgtcaggactctcagtgcggagcgcctcgctgtggaagccccagaagaggagggtcggccgcaaacatgccccgcgccgacgttaacgcctcacctgcactggaacctgaacaactcagctctcaatatgctgccaaagaaccaagtcgaagagctgtacgggttgttcatgttctacgactcgtccacgattggagacgcgctgccttcgatcaactgtacgcggttcatggagctcctgcgcgacgccggactgctcagcaacaatgatgttatccctagttccagctcggttgtgccaccgacggaaggacttcgggttgagagtgtcgagaggatcttcgcacaggctgtcatgggcaaaatgcgcgtctacttggacgcagacgaccagccagcgctgacgttctcgctcttctgcggcgccatcatgaattgcgcgatgctgctggttccgtcggagcatcccaccgacgcgttacgccagactcttccgaggcttctcgcctgctcgattggcaccgagcatcacgcttcagcggcgaagaagggcttgatcggacacctccccacgggtggcacgctttcgtgttggatacccgagcaatcacatgctccgctccctcagccagaagacggtcaacaagacttccgagacctgccgtctttccaacaagtcatcgccgactgtgagagcgacatggcgctcgaggagctcaggcaggagagagtggcaaagctctaccatatccctgatcgcctgcttgcgagcttcgagcacgacacgatcgcactcatttcggacaagttccgtctgtatgatgtctctgaacgcggagtgctgccacgccacgagatattcgcgctgctctcgggtctgggcaaacgcgtagaccttcctgatccgtactcggtgctcccgaggctctttgcttctaataacccgatgagtggtggaggcaccggcggtggaattagcagcgagagtgagatgacattagcggagctgctcctagccattgaggtgactcgagaggccaagcgacattcctccgcagcacgccttgcctcgatgaagatccgactgacccgagcagctacgacagccagacacagcctctccttcgaaccaaacgcagacgatgacaaccaaagtttactggaactgaacgatgttccagtgcaagacaaaagcgccagcacggaaggctccaaaggtgccaaagagcgtggaaggagacggggtgtattgaagccacgcaagtcaacgctaagccaagcctccgattcagacggtccgatccgtatgacgaagtcgcgcggctccaaggcgcacctcgttcaccacccgtccactgctaacaggagaaaagccgtcttgccctggaggacgtcgtcgatcaacagcaacaaagctgaagccatgacgtccgtggcagcagagttgattaaccaggaagagccgacatcccggaggcaatccgcgctgttagccacagccagagagaaagagcccacagttgtggaggcggactccttggacactaacattcccaacagtaatgacaccgtgagcgctcttcaccaggtttccgacgcagaccatgagccagagttgctatgcccaccgattatgacgattgaagtgtgtgaacccccaagtgcaagcaacaggaagacgatccgtatcttcttgctgctcggtggtgaccacgatggagccatttgctgcaccatctccctcgtgtttgcgaccaaagaaatcaccgaaagcgaggggatattctacgcgacagcaccaaacgagacgacacgaacgaagcccgtgttgccgactcaaaagactttggccaccgcgctacgtatgctgaagaagtgcgtgataaccagaatggagcgcggtttcgagcagcgtcctgctggccaactcattgtcgtggataaaatgctgcaagatctgaacgaacgacaaccgcactacagcacccccgttatcaagacgtcgcgggatactgcagtgctacctccaaggcaaccccttgctaccgcttcagtatctcaaaggtccgaagggtgccgccaaatctcctcggctccatcagaccatatccacaggttaccatggcaacaagcgaaagttccaccccattcaaagtctacccgttcacagagcaaactcccgaagaactataaagacctccttgcaacgtggcaggttgctggaagcgacacgtgggtccacaatgtgaatgcggcatcgcctctccagccggcactgtacacataccaccaagccatgccctctcgtagtggccatctaagccctcttcgattcccgtcgagactaggcagccacatcaaaaacaccgaagagccttgagctcaaccaacccttcgttcgacagtcttcagattgcggcgagtttctctgtcttcgattcattgaactcctaaaggagaccgaccctcatgcttgtctgtaaaaatacctgcctctgtcttccaagaatggccttccttggtacggagagagtggaagtatcgattgcaaactcattcatgaacgcctgacaatcgagagcatggatactcgagtcgccaccgctcccactccaggagccaaaaagtgcacaaagacaaatgtcggcggctcgtcgtgtctgctgcgtcagcattccaacaaaactgtcaacaaatatcgtcctgaagccactgcagcaaccgaaactcaccgaccgaacacctgtccggtgcctactttgacgccgcagttccactggaatttgaacaattcagcgctcaagacactgacgcaaaaccaggttaaccagctctacgggttgttcaagttctacgactcctccgcagttggagacgacctgccctcaattaactgcgcccgactcgtcgaaatcctccgcgacgcccgattgataaacgaaagcagcagcagcggtactaacgttagctccgtgatgccgtcaactaggggcctccaagtcgacagtgtcgagcgcattttcgctcaggcagtcatgggcaagatgcgcgtgtacttggacgcggacggccagcctgcgttcacgttccctctattctgcggcgcgctcatgaactgtgcaatgctgttaactccactgccacaccctgaggctgcacttcgtcaaatttcccccattctccttgagggctcaatcgtaaatgggcatcacgtctccgccgacaaagggatccttgggctctttcctaaagacggcgcgatctcgatgtggacgcctggccagttgcaggatccgcatcaatcgaccgacgactttcgagaatcgacaccattccagcaagtgatagcagactgtacacgcgataaggctctggaggagctgaagcaggagaagctgacgaggtgctatcatattcctgatcgcctgcttgcaagcttccaccgagacacgatcgcgctcgtttccgacaagttccgcacctttgacgtgtttgatcgcggtactttgccgcggcaggaagtcttccccctactttcgagtgtgggcagacgcgcagacctccccgatccatacgcagttctggcaaatctgtctgcgtcaaatggcccttcgtcggagatgagtggtggcggcggtgaattgacactgatacagctgctccaagccattgaagcgacccgagactcgaagctgcattcaatcacagctcgactcggcgcaatgaaggtgaacaaccacccacgcgtggacccagcgactgaagacgaatctgctttggatggacatttgcctcccgccatcaaggaaactgcggacgacgagactgaccatgatcacaccgcaagctccactcaccaccatggcaatgctggtggctccatcagcaaagagcggaaaaagttgggagtgcctcgctcaaagtctcgacggtctatgctatcgcagccaaagttcgtccagctcctcgagtcactcgctgataggtagtaagcaccgcggcgggtctaagaaccgcctcgctcatcacgcctccacctcaggcaagaagatagagctgcgacgaaagtcgtcgacaaaaggccgcattctcggcattgcgactaccgactcggagagccatggatcggtgatgcagtcgatggagtcaggctcgcactcccatcgctcgaacaactccgacagctccgattatcaggagacggcgggctccatcactcctcgtactgatgacttcagtaccgatcggcgcaacagcaggtacttcgagcacaatggacacgtgagcacagcggcgactcacgtgcatgaaccatcgagcaacagcaagacacttcgcatcttcttgctgctgggcggggaccacgacggcgccatttgctgcacgctttcgttgaagcttgcaacccgcgaaattgtggagagcgaggggacttactactcagccgcaccgagcgaaatcacgcgactgatgcccatgctgcccacgcaaaacagtctcaccaacgcgctgctgctgctcaagaagtgcgtgtcgatcaaacaggaacgcggctttgagctccgccccgctaatcaactggctgtcgtggatgacatgctgcttaagctcaaaaagcgagagccacgcttcagcatcgctctgaagcccgggcccagagcatcacttgccgccgcgtcaacggtaaatctgagtccagctaatccagcaaacaccacgaaggcggaggaggaggagggaggaatattcacttcgtcctctttggacttgattcctgctttgaagattgaatcccgcccaattttgtcatccccgccacggcagcagaaacctctctctcttcccaagcctgcgtacaagcatcaattcgaacttccgagcaactacagagatatagtcgcatcgtgggaggtctccaaaagcgacgtatatgcatgggtccacgctgtaaacgccgcgtcgccactgaagccggcttcaccgctccgcaccaaaacaaaaccccatcgaagtggccacctcagtccgcttcgacttccgcatagacacgactattagaggaccacagtcgtcgcccagaaacccaacgcaatgcactcttcatcgtaactcttcgttctgcgtcacacatagaaaaacggcattccttcaaaaccctcagatcagttacttattagcgtcctcgggatggataatacgccgcccgctcgtcgccttagacgatttcttcttcacgaattttgacgcaaagcgggacattgcactgctccagcttgcagttcatagcgtggtacgcaaagagctcggccgtgatccgtgcgagtcggtaggagcgccatttgtcgctgtgcgatgcccaacacacgctgcgcaggaagcgcttcatgtggggacagaacacatggaattccgcgtccgcgcacttgacgtcgtcgcaactgcacgcgtgaacgagcaacgcgtttgctgactctgggtttccttccagcgcctgagagatctgtgcacaagataacaatcgttagccagcacaaactcgtgaaaacaatagcaaccgcgtaccgggaatgatgccggtccatctgcccctccatccgctgccgctacgtcgccactagtcggcgcctctggctccgtctcgttcgtctgcactgcgccagcattttccactgctgcgcctccagcccgcagctgctccgccatcacccgcacgtccaccgcagcactagccgcttcggtatccggatacttgacccggcactttggacagtaccacgtgccctcgggcaccttgggcagcggcgggctcagacagaagacgtggtactcggcgtcgcagtcgtcgcagagcacaatgtcgcgctcgcgctccgagctcttgcacacctcgcacaccgtgttcttgtcctcctcttccgcctcctctgcgtctgcgtctgcgtccatctccacgtcgttgtctgcagctgcagcgttgttctctattggctcctgctgctgctgttcctgctgcggctgctgcgacgcgtccgactcaaagtcgctgagctcgtccatggggttcacctcgcgcatgtccacctcgctggaggactcgctctggtagctgctcgggtcgatgaactgcgggctttcattgctgccctcggacggcggagcacgtgcagtagctctactgcctgtcctcgttgacaccatgcttgtatcgctgcctgggctcggtgctggacctactcattcagcggcggttgggcaaaatataataggtggttagcaaattaatgtgatttgggccagaaatgtgatttgggtacgcacgttcggatttgactggcggcgcgtaccgggagccgccgcggcccacgctggaggacggcggcgccgcgcccggcagcttggcgatcgtgcgctgcacgaacgcgtcgatgcgctgtaggtccggatcgcgcgccacggccgtctcccagttgtacagcgttgacgagctggccattttgagcaaaaagcaatactagtggttctcacggttggtagatttgcaggtttcaggaagatctaaccaatcagcgtaaacctgcaggtgtgttcagaaagtgcattgcaggttagccagcatactttgtgacttgctgcaggtttgcaggtaaatcctattggctgatgaaacctgcggacctgagaaccactagtccaaagtcaataatatggtcactcaaattgatcagtacatttaatattattgaagataccgtcggcatgttgcgcgtcgcttacgaaggagagcgaggtgccattgtagttctgctcttgttctccccgccatcccccacgcactgtgcgctccaccagccggcaagggcatttacctaactttagatggctccagcttaccttacacaaaaggaggatctacgcgctctttcaaggcgtagcgacaggtgcagtccgtgcaaatttctccgagggcaactcacccctcaatcactgagctacggtatgattgtgcgtccggggacccgagcgaacgaccgaccgctgtcgaagcgttatacaaactgcaagcttagctttagaccagggctttataccattaactgggggaaaatatgcgggctacggcttgcaggtgtacgcccgactacttcgtgctaaggaaatagctttcatgactatccggatacagatagacatcaatgtgtacactacagtactattttctctttttttacctgctttggctacaagcgtcgctcatagctctgtcactgtattcgcgaaagccgaggaagttggatacgcgatcgccgatgacattcgttcacggacgcgctgatgacgatggcggctggtgtccataaatctgcatgtcgagaactggatggcacagtatattggtgcacttcaccaactctgtgcccgagtgcggtagatatttgctcaaaatagctacgaggtgatcgtggtgaccctggcatgcattgtacttaagagcagacaaggccactttggctacaataggtactctgcgactttaatgagcccgaggtgtgctcaactccacggacggcatagataggtgtgttagaggtgggtagtaatcaccatttccgtgcatcaggtcgtcgtctgtacgcggcagcaacttgccgaataattccataccaagtgatgcaacaactcctctccattcccgaaccgacctacaagcactcaaggcgtgaagagcgttctcaatcgggcctgggatcaccagcatgcgtcagggatgcttctttctgatagccgtcgccttcgctgcatgtatccaggcttttgctatcgccgaacaggccaacgcaattgcaagcctccgaagcagcagttaaacgggtgacggaatggcaccaccaatgctgaggccgaagagagaatgcagacgcaaagtgaactcgttttctaccaaagagtccagtgttgtcaagaagttgaaggagtatccgaccttgaccaagacgctgagcggcaattcatcgcttctcaagcctttcgagaacaaccctcagcttgtcaagacgttcgagagcttgcaaaaggacacggctctaatggcgaggatggagagtttgaaaaagagtccttccatggacaagctcaagacggtgatcagcaagaatccgagcgcgctgacggaggaaagagtggagaagcttggtgcggccgtgctgaagaaacgttctagcagattatcaagcgaagacgaacggggctttttgtacgcgtgcggaacgatgtttttattcacacttggcgcaacgattacactcgcgctaaccgcaggatcaaggttgtagtcaggcttcgagacaaagtcataaacatcagagcgcctgcgtgcccttgatcacctcgcccgtcgtgccgttctcgctgatttaatcgccctcgcgcagcagcacctcggtgccgctcgacttgtggaagcgcatcgtcttggtcttggcgtcgatggacaccgcgcgcgcagccacaaaggcacgcttcgccccagccgcgggccaccacggctgcgtgggacgtcatgccgccgcgagacgtgagggcgctctcggccgcgtgcaagccgcccacttccttgggcgacgtctcctcacgcatcagtatacacgcgaaccacgcctccgcgagggtcgccgcgaacacgatcttgcccacggttgcgcccggagatgccggcaggcctcggcacagcacgtccttgctccaccacggcctcttcctccgttatcagcttttagcgccaagcggcggagcccgtgtgcttgcagttgcgcgtctgcgtcctgcaccgtgaactccgtgccctccacgttcttgaaatgcacctccagcatgtagacggtctcgtcgtgctgtctctacacggtcgacaacttctgcgccagctccgagatatgtagacaaaagcctgcacgttcacggccgtgcccttaatcctccttgcaacaatggtattataatatccagctcaaacacaaacttgaaacgttgatcttcacatcgatattgctggcgatgttgcacgatgtcaatgctgtcaagcacgcaacttaaagacgctggccgttacgttgcaggatatcaatgtatcaaacttttctgaggccgcctaacgagtatgcctacagaaacggacgagccgcttcgagatttgcgttcaagttggtgtcaatgaacgggaccggtgatttctccccgaagtctgcctcacctagcgcgatccgcgcttcttcgctcaactgctcccacatgacgagatcttggagttcgccagtaccccttgccgtagtcggtcgcagcgtgtgaacaggctcttcgagagaacgcacgtacgagagcatgggggtcgtcatgttgatatactcgacgaacttcgggtcgcaaccgtaacgatagcactctggcggttcgttcttcaaaatgtcataccctcctttcacgttccaagtcgagatggcgagaatcttgggggtctcgaccgcagggttgtccaaccacactacggcgctgacccatttgtgtcgttggcccttgttaaggaaatcgactttatccttggggaagtaccagccgtacacgatggcccagagatccttgtaccatatagctcgtccatacacttgcgagccgagagcggaccccttgcatttcccgtctatacgtccacttccttttagccccgcgctcgtttcacccgcagcgttgacagcagggtacgggtggcatccgtcaacgatgtggagactcggtttgaattttacagcggttttctcggacacggtgactggctcgggctgcgcaaacggctgtaccttgtcgtggtcgatagtgacagcccccgcagcgctgaaggaggcgatggcgattgcggagagaagaagagagcgtaggatcatggtgtggcttgcagtgcaggaaggcggtgaatctgaaagtgaacattgcttcccgaaaggcttgcgatcaaaccgagagtcggttgtcccatctttcgcagcatcatgctggggccaacgagggagtaccctctacaccgtagatctaacaaaaacacctgaagtatgcttcagcaccgtagttcctcggatttgcaccacagaacaactatccatacctctttgtataccagctggttgcaaaaaacatgtgtccgggttcactcattacatattgtactgtagaccttaaaacgagtttgtcagcgctctatcagactcttagcactacagtaatctgcttgctcagcgaacaggcagaaccttatactttttgagaaaacatgtttcccgaattgtaccacacttagggagatgtattgttttagtgaacggtggagtcccagatgaaaactatctccttagagcgtgttcgctaggtagctggagatggagatgacctctcatcaaatctatttcttgtcttttgattggtcaaaatagtttagttcacaacgtgacaactggaaaattacttcgtctctttctccagctggagaaggagaaagtagctggagatnnnnnnnnnnnnnnnnnnnnnnnnnnnnnnnnnnnnnnnnnnnnnnnnnnnnnnnnnnnnnnnnnnnnnnnnnnnnnnnnnnnnnnnnnnnnnnnnnnnnnnnnnnnnnnnnnnnnnnnnnnnnnnnnnnnnnnnnnnnnnnnnnnnnnnnnnnnnnnnnnnnnnnnnnnnnnnnnnnnnnnnnnnnnnnnnnnnnnnnnnnnnnnnnnnnnnnnnnnnnnnnnnnnnnnnnnnnnnnnnnnnnnnnnnnnnnnnnnnnnnnnnnnnnnnnnnnnnnnnnnnnnnnnnnnnnnnnnnnnnnnnnnnnnnnnnnnnnnnnnnnnnnnnnnnnnnnnnnnnnnnnnnnnnnnnnnnnnnnnnnnnnnnnnnnnnnnnnnnnnnnnnnnnnnnnnnnnnnnnnnnnnnnnnnnnnnnnnnnnnnnnnnnnnnnnnnnnnnnnnnnnnnnnnnnnnnnnnnnnnnnnnnnnnncccatgactgcctgagcgaaaatgcgctcgacactgtcgacttggaggcccctagttgacggcatcacggagctaacgttagtaccgctgctgctgctttcgtttatcaatcgggcgtcgcggaggatttcgacgagtcgggcgcagttaattgagggcaggtcgtctccaactgcggaggagtcgtagaacttgaacaacccgtagagctggttaacctggttttgcgtcagtgtcttgagcgctgaattgttcaaattccagtggaactgcggcgtcaaagtaggcaccggacaggtgttcggtcggtgagtttcggttgctgcagtggcttcaggacgatatttgttgacagttttgttggaatgctgacgcagcagacacgacgagccgccgacatttgtctttgtgcactttttggctcctggagtgggagcggtggcgactcgagtatccatgctctcgattgtcaggcgttcatgaatgagtttgcaatcgatacttccactctctccgtaccaaggaaggccattcttggaagacagaggcaggtatttttacagacaagcatgagggtcggtctcctttaggagttcaatgaatcgaagacagagaaactcgccgcaatctgaagactgtcgaacgaagggttggttgagctcaaggctcttcggtgtttttgatgtggctgcctagtctcgacgggaatcgaagagggcttagatggccactacgagagggcatggcttggtggtatgtgtacagtgccggctggagaggcgatgccgcattcacattgtggacccacgtgtcgcttccagcaacctgccacgttgcaaggaggtctttatagttcttcgggagtttgctctgtgaacgggtagactttgaatggggtggaactttcgcttgttgccatggtaacctgtggatatggtctgatggagccgaggagatttggcggcacccttcggacctttgagatactgaagcggtagcaaggggttgccttggaggtagcactgcagtatcccgcgacgtcttgataacgggggtgctgtagtgcggttgtcgttcgttcagatcttgcagcattttatccacgacaatgagttggccagcaggacgctgctcgaaaccgcgctccattctggttatcacgcacttcttcagcatacgtagcgcggtggccaaagtcttttgagtcggcaacacgggcttcgttcgtgtcgtctcgtttggtgctgtcgcgtagaatatcccctcgctttcggtgatttctttggtcgcaaacacgagggagatggtgcagcaaatggctccatcgtggtcaccaccgagcagcaagaagatacggatcgtcttcctgttgcttgcacttgggggttcacacacttcaatcgtcataatcggtgggcatagcaactctggctcatggtctgcgtcggaaacctggtgaagagcgctcacggtgtcattactgttgggaatgttagtgtccaaggagtccgcctccacaactgtgggctctttctctctggctgtggctaacagcgcggattgcctccgggatgtcggctcttcctggttaatcaactctgctgccacggacgtcatggcttcagctttgttgctgttgatcgacgacgtcctccagggcaagacggcttttctcctgttagcagtggacgggtggtgaacgaggtgcgccttggagccgcgcgacttcgtcatacggatcggaccgtctgaatcggaggcttggcttagcgttgacttgcgtggcttcaatacaccccgtctccttccacgctctttggcacctttggagccttccgtgctggcgcttttgtcttgcactggaacatcgttcagttccagtaaactttggttgtcatcgtctgcgtttggttcgaaggagaggctgtgtctggctgtcgtagctgctcgggtcagtcggatcttcatcgaggcaaggcgtgctgcggaggaatgtcgcttggcctctcgagtcacctcaatggctaggagcagctccgctaatgtcatctcactctcgctgctaattccaccgccggtgcctccaccactcatcgggttattagaagcaaagagcctcgggagcaccgagtacggatcaggaaggtctacgcgtttgcccagacccgagagcagcgcgaatatctcgtggcgtggcagcactccgcgttcagagacatcatacagacggaacttgtccgaaatgagtgcgatcgtgtcgtgctcgaagctcgcaagcaggcgatcagggatatggtagagctttgccactctctcctgcctgagctcctcgagcgccatgtcgctctcacagtcggcgatgacttgttggaaagacggcaggtctcggaagtcttgttgaccgtcttctggctgagggagcggagcatgtgattgctcgggtatccaacacgaaagcgtgccacccgtggggaggtgtccgatcaagcccttcttcgccgctgaagcgtgatgctcggtgccaatcgagcaggcgagaagcctcggaagagtctggcgtaacgcgtcggtgggatgctccgacggaaccagcagcatcgcgcaattcatgatggcgccgcagaagagcgagaacgtcagcgctggctggtcgtctgcgtccaagtagacgcgcattttgcccatgacagcctgtgcgaagatcctctcgacactctcaacccgaagtccttccgtcggtggcacaaccgagctggaactagggataacatcattgttgctgagcagtccggcgtcgcgcaggagctccatgaaccgcgtacagttgatcgaaggcagcgcgtctccaatcgtggacgagtcgtagaacatgaacaacccgtacagctcttcgacttggttctttggcagcatattgagagctgagttgttcaggttccagtgcaggtgaggcgttaacgtcggcgcggggcatgtttgcggccgaccctcctcttctggggcttccacagcgaggcgctccgcactgagagtcctgacatttcgcagcagatgcgacgatccagggttcttggaccaccgtttggccttcgggcctgaagcagtagagacacggggatccatgcgccctgctagccaacccgcttgcactgctgatactcgttccctgatcaaatgcgctgtagttagtacgagcgagtattttaagcagcagaaataccaacagacaatgtgatacgcaacgacagtaattgccagattccggaccggaatccggaaacctgtcaaacctgcaatagagacacactggcgaaacataaaatcacttgtgccaatcaggcccacttattcattccggacagcgatagaaaggtatgaaaatcgggctattgtaatttacaatttgtaaacatctcggttcagtatttttaagcacgacgcagggacggatggcaggcggctaggagtgcatggcggaggactggagcgcgaggaagaggacaggtcacggtgcgccgtgggcgtagatgctgttgtgccccaccacggcgacacgaaagcggtgatcggcggtggccacagcttcagcgtgatcgcgaggaggaacgcgcagagcgccgtgccgtcaggaggcgctccagcgggcgagctggacgtgaccgcgcgagcataaggaggaggcgggcgcgacgagtggatgctcagtcgcttcgaggcgctgagtgacgccgtgcggccctaggagcctctccgtcgaggccgagctgtacgccatggaggcgacgcggcagatgccgatgcgcaggcagcgcatagcgagcgcgatgtgaggaaggaggcgctgcaggagtagtgcgcgcacggggcggtggtgctgggcaaagattaggcacgtgagaaggaggaagaggagacggagaagctcgaggcgcatacggcgacaagcggggctgcgcgttgagtgaagtgcggccgactgaggaccaccacccgctccaagcggcgtccgccgtccgagacgaaggagacggtgccggcgaaggcggtgagcagcgaggtcggagcgatgacgcgacccgcatcacaacagtcacgacgaagaagcacgtgaagttcgagagcaaggtcaaggaagctttccatcgaggtggcgccttcccgccaagagcaggagctgctggcacagctggagcacaaggtcaaggggctgtacgtgcaggagggtgaggggggggggctggaggacaagtcacagaggaggagcaggcgcgcgcggagtgggctggactacacgggacgctgtcctcggcaccatacacacccgggtgctgtgctgtggcgcgcagtccaagcgggagaagacgctgaagtagatacggcggcaaggcagcccaacgtggacggtcgggacgaccaatgcgtagctagacccagtagagactacagaattttgcaaaactcggaagttcgatgatcatctaggacattagttatctactgagcttattctgcctttcgtttactcggccacagcggtttgcgtgttggagtcggccttgaacttccagcgacggttgtcgagaccgcgagaagctcgctgtcagtcttgggcaagtctgaatgtggctacatccggcaggtatagcacttatcgagtaagaacgagaaacatctttagttttgtatgattacttatttgcgcgaagcaggaaattccggacgattccagaaataagtaggaatggaataaaactaaccctaatgagcgacgattggatgaaaataggtaattaagcatcaaatggtaagaaaaaaatcactgattggcttcagcgaggtggcaagctttgcataggggtcgggtgtccggccaaatactacttatcctacaataataacaaacacctgctcggtcacaattagccaacacatcattccacaaatgtagccatgtttgtcgagataagaagaagagaaggatattttaaagcagcacttggcctcgtagctggcgacacatgggtacatcgcactgcagcgcctggcagtgcagcgcgtggtacgtgaacagctcgacgaccgccgtggcgatggggtacgaccgccagcgttcactgtgagacgcccagcaggccgcgcgcaggaagcgcttcatgtgcgagcaaagcgcacggaactcggggtgtcggcactgcgcgtcgtcgcagctgcacgcgtgggtcagcagcaggttggtgcggtccttctcgtcgtcgggcaccgccgcctggtacgccgctgatagctaatgcaggtgcagtagtattagtgataacacgcatgtcatgtcaaagtgatggatgcatatcagtctcaccgcttgcgctacggcgtcgcccgctgcgccgttggcctgagccccgttggtctgtacgcgctcctgcttgatgctgacgttggccatgggctcggacggctgcgcgcggccttgatctggcgtagagcggcggaaaagagtgtagccatgttggtagtgaaaggtacactgtaccattggttgctccagatgtaacgatttgcagcatgatgccccatacaaaaagcaagtcaactggttccttaccgaaagagacagccaacagacacgtcagtgctccgacagcggcagatctcactcctgcgctgccagttcttcgcccaggtggggcgctctgtaggctgcgcatggcgtcttcttcttcttctccgccgtcccccggctccagcgagctctcgttcgcgtgcgtaacctcggcgctggcgtcgctctgggcatccgcgtgcgaggcgaggcagaacgtaacccggcagaggttactcttcttcctcaagcaacatgtacccatcttagaatggctaccggcgtacgacctgagtgaggacctgcagttcgacgtggtgtccggggttacggtcgggctcatgctcgtaccccaggaggtatcccttgcagccatcatgggcgtaccccccatctacgggctatacacggccgcggttgtacccatgatctacccgctcttcggcacctcccgggtgctgagtgtggccaacggagctgaagtgagtctactcgtgggctcggccatcaagaaggtggagagtgaggaggaacggatcgctaccggtattctcctgagcttcctgagtggcgtggtgctgctgttcatggggatgttccgactgggagtcatcgccgacttcttctcaaggcccgtcatgggtggattcatctcggccggaggtgtactcatcatgctgtcccagatgaatctgtggctggggatcgacatcaagagcaaggatctgccggtgctgacggtgtgggatctgatggagcagttgccacacctcaacaccttcagctttgcactcggtaccttttcaatcttggtgctggtgggcatgcacgagctgaaacgccgcgtggtgaggaagctggctagagtcgaggaggagctcgaggaccagttcgcgattgagacgtccagggcgctgaatcaactgtccatgagcatgagctcgaacggcgagcagagtgacatgagtgaggacgaagaggaggacagtcaggacgccaaggatgatcgacaagcggagggcagctatggtggagatatcgaactgggggacgcccccaagccaaagaaacgccagccaaagagtagcgatgatgaagccaacttggacgtggaagacgtgacggtatcgccgcgtggatcgaggtgggccgacttgcccgctgtgttcacgacgggctcgctgcgacgtcgggacttcatggtgtcgtccccatgggcctcatcgtcacgcaatagtcgagatcttggtgctaacgacctggatctggctcgctctactcgtcagagagacctggctgcgattactcgtagcactcgtcatggacgcatggacgacgaaggtgtgggcttttcgctttcggacgaggattacattactattgagagaccgttggactttggcactccccctgatgctgctgctgggatgcaccgttctagctcggatgaaacgggcgtagcgcggactttgcctaggatgcacccaacccagcctaaggtggagagacccgggcgcaaccgtggcggagatactgatgacgacgatgacgcagatgccaaggctgaggctgaaatgaagagacgtgtgaaggagcttgcttcgcctgcgaagtcagagactgggtcggaatcggcgacttcgactacggcgcttactggacgcatgcttgcagcgtcgtcgacgtcaattcgcatattgcgctcgaagatggctgtgctgatcgcgctgcggttggtgtgcgacttgggtgcgttcatggtgtgtctgctgggtggaatcgttggctacttggccccagaaggttctcttgctcttgccggggatgtccccggtggttatccatcaccgctaaggccctggtatggattgagtacgaacattatcgaggctgatcgtctgtaccacctcttcatcgacacgctgtcgattgccatcatctcgtacatgtgcagtgtcgccatggccaagcgtctcgcgattaaagaaggctacaggatcaggccaaaccaagagctcatcgcgctgggtttctccaacctcgttgggtcttttttccagggtatgccgtccaccggaggtctttcgcgtactgcggtgaacatgcagaacgcccgcacccagcttgcgagtgtgatcgcagtgctggtcgtggtgtttgtgctgtacacatccacttcagctctcgcgtacctaccgaaggcaagtctcgcttccatcatcatcgtcgctggctactcactgatcgagatgaaggaagccaaatggctgtatcgtgtcaagcgcgacgaattttatgtgtggctggcgtcatttgtgctgtcgtgtctgctgggtgtgctgcctggacttctgtcctccatcttttgctcgctgattgctgtgatttacaagactcgtcgcccgaccgtgtccatgctgggtgaggttatcgacgaggaaaccggggggaagcggattgtggagttggacttgtaccccgacacggcgcatccgttgtctgatatcgtggcgattcgagtggaaggcgctctgtacttcgctaactgcgaatacattgagcgcgtggtggaacgggaggtgcgcaggcgccacgagaccgagggcgtgcgagtccgtggtgtggtgattgatgcaggctccatcatggactgggataccacgaccatccagatgatgaagcatttgaaggccgagcttcgcggacaaggcatcatgctggcgatcgtgaacgcacgagaccgcctgcagcttctacttgagacgtccgagttcctcgtgggtatcgtgcacagcgatgctcggatcgggttcaccgaggccatcaccgccatccgcgaggaagacatgccttcggatgagagtcaagccttggcgcgtgccactcgggtgcacagcatctagaatggggggtccaaggcagtcgagttaaatgtcgttgtaataatgaagtgactgaaaactgaacgtcgagcgtggcgccaaattgagctgctgggtctggaaatagcggagttacgtgagtggaaatggagaaggtgatgaggttgagatgccccagtttacagagctttgggacggaatggagactgtccccgcccctcagtcaaagctgaacgcgactgcggtagatgaccccaagcgcgtctccatatcggcggatgacgtcgagaagttgctggacaaagtgacgaaccacatccagtcgatctcgccgcaagacgagctgcacgcgctcgtgaccgacttcaaggggttcatccagcgcggtaatatcgtcgacctggccatcggtatgatcatgggcacgtcgttcacggcgatcctccagtctctggtggtggacattctgtcgccgatcctcagtctcgtgtcgacgcgcagcttggcaaactactacgccgtggcaaggtgccccaacgaccgcaaagactgcagcagtgctacgtgggagacccctcaaatggctcgcgaccacggagctatcactgtcaactatggactcttcatcgagaacgtcgtgcgcttcttcatcaatgccatctttctctactttgcggtcaaacgaggtacgccccctccacctggtggtttcgagctgaacttgatcactgactgttatacatgacttggatctctgcagcgatgatggtcgttcaaggcttaaataaactgatgaaggcggatctcatcaagaaaggactcaaggtggcgcctaccgagaccaaagctgcaacgagcacctagcagacctcaacaatgtttaaccccttggttcccggaatccaggacccaaaacacattaactacggtactctatgtcgtatcttacgactttgttttttcactgggaatttgtatgctgtgcataatcctgggtgcattagttttgagcaggttctctctcgcaatgtcgtaagtcttacgacttccggtgtctcggcatcttcacaatgttgtaacttaccccttttggctgcacaactctgtacagtgaatccagactcaaggaaaaagacaaggcaaaagatgcaagacttcaagaaaattgccatcacaatccaaccaaaactgacacgcggaaggactggcaccatgtcttttcctcacccttgtattcacgacggatcttgttgcacagccagcatttggcgtcgtcgacagagcaacgctcgcagaagtacgtggtagcgaacgacttcttctttccatttgtacgcaggagagagcacaccttacatgagcgctgccgacgcttttgaacaccgctgacggtcacccagtcttcggattgctccagcgcatgcgtgaggcgaaccggtccacgtctgcgcttttggctgcttggtagcggcgaagcatccacgccgtcaaaatcatcggctttgagctgcaaaagttggttctgcaatacgccaaaaaactcaccgcgtttcagcggcacagccccgtcaagtcgtgctgcttccttgtgcaaaatgtaggcgttcaccaaggctagatccacgaagcccaaaaacaagctcttgtaatactttctgaacttggtagatttctgcagcgagaacttttgtaggcgcagttgatcattcacatctacgccacccatccagcgctggtagtcgttcacggccgccggacacggcaccgtaatggggcccacttgcttgacgttgcggtcgattgtcgaagctgtcatcgctgatcccgtgcacagatagtgtaccggcttgcggtcccaccagtgaagcgctaccatgcttggaactgcgaccgagcgcgagaacgtgaacgtgccgcgaggaataaacgctggtcgcgacttccgcttctctacgatgttttggtccagtccgagacggtcaatcatgatagttccgatcacgtacacgcccatagcaagcagctcgatcgccagaagaatggaggaatagaagcggtcgacgacgactaggtgccaagcgtgtcgtgcattgctgtcgagcactatcttcagatttcgaacgacggcggcagctccagttttgtgatcgaatgcgcttgcaccaccgtcactagagctgcgcttgcccgcataaatttcaaacctagaacgttacgacatacagatgtacacgttaggaacaaatagtaaatacagaggagtgtgcaaagatattataacatacctgtggcaatacgcagttcttgaatcgcacagcatgaacattttagaaccataacgatggggtttgtctcatgaacattcgagtcgtattgcgctttgaggtcgaaggaagcacgccttcgtcaaaggaaaacacagccgggagcgtcatgcggctaaaaactgctgctgcagcttgttcacaactgggcgaagctttcatagttcgtcacgtgtgcgagtggccttgttgtcgacaaagtgcaagtcgcgtaagatgctttgacaccgattacgccccataaaccgaccgaacgtccctgccggaatagcgccatcttcagtcatcgaccagtgatcagcaaaacgacgccgctgcgggcagcgcatacgggcaatgagaagcccaacgacgtgcaatatcttgtgggtctcatacagcggacttgactttaagcgccgacgaatctgagccaacgttttgcgaggacgcccgctaactcggataccttgcttagctagaatagcttcagcgcgctggtccagttgctgcttgttgtactcgttcgtctcctcggttatcgtgactcgcaacgacttcggcatgaagtagaagaatgtaagtaggggcgagtggcaaagaacacgcagctcagcaacgggacgggcttcttccatctgcaagcctgggtagggggtcacgccatcctcgaacgccgacgacgcagaagtccacttcttggcacgtagtgccgctgctcgctgctcggcttcttttttggtaagagagttattaccacttagaagcgatgcgataaacgcttcatccaactgtacagtgtcgtcttcagacatagtctcctcgtcgtcactagcagcactgcagtcatcgtcatcatcaatggcgtcttctccctcactctcttcggagctaaagctctcatagtcactcatacgctcgtcttcaggaacgatgttgatgtcctgcttcacttggacgcggggtcgtaacactcgccctgctgattgtgctggggcctgccttgcctcttcctcactcgttacgcccgctcgccgatctcctgtagccgcaacttgctctatgtcatccgacaacagcgtactcggggacaaatcaaatgcccgggacacagcggtctgggagagctcaacgtttggctgactgggggcttcattcaacgcgtccagagtgtgctgagagagctgggcagtcgtgtcgatctgcgacgcacggatatcttcatccccttggccgtcgacgtcagcagcggtgcccttttcgctcttgctttcgttgtcgtcattcgtgctgctgcctaatagtccggactagatcgcatgctgaacgactgcgtcctcgcctacaagcacagtagcgccatcggagcttacgtagctccagtccttttgaatccctcttggacgtttcgcggtccagtctggcgccagaaatgcccgaagtcgatctcccgtgcgaccgcagcgacggccgcagtcttcccacgacgacttgtacgaatgcgcgccatccggcaagttctagaatgactccggatcccatcgcgcagcacgcccgcaatcctccgtctctcattcccgctgacctgtctttgaatttgtctatcttacctcttgcatcttattttttggaaatgacttgctttaagtattggccaagccatttgctattgtagcttcctcaatgtcgtattatacggctttgccaaaacgcagtcgccaaaacgcaaagtcgtaacttgcgacgttgggaaccaaggggttaaacatggctgcattttcgttaagtacgacacctgtcgacgaatctgatcctctgccgctcgctcatccccttaattgtggagaccagcgagtctgaagttcattcacttggactcccgctctgccttgagctcatccgtctttagtccttagttgtccgctaccatgcgctggaatccgttcgctgcacccccgccacccccgccggagaatatctcgctgctcgatcgagtgcaagaccgtgcaagagctggcgaaccgggagatcgtgacgactcgtgctctcctcaccgacttccaggagttcatccagcagggcaacatgctcaacatggcggtgggtctcatcctgggctcgtccatctccgccatcctcaactccttggtcacggacattctagcgccgatcatcagcctcttcacaggtaaggcgaacgtgacattaccattgataggcttagtactaactgggagtttgacttgtgtgtagctcgaggaatcgcaaaccactactggccgttgcgatgaccaacgactacacccgagtgctccagtgactcgtggcaaacttggaaggaaggtaaggggacagattgttttattttttaatttcaaatagggtggacgtccaacttgctccgttgacttgtagcccgggacgccggcgccgtaaccatcaactatgggctgttctttgagaacatcatgaacttcgtcatcaacgctctcttcctcttctttgctgtgaagaaaggtgcgtaaaataaaaacgatggctgtggtcaggggcgcttacaataatgttgtgccgttttgcgcaacagcacgcgagttcgtgttcaagctcaaggtgggcgtgaagaagcagtgcccgtactgcaaggagttcgtgaagggagccgccacgagatgcaaggactgcggctcagacatcagcactccgcccagcgcaggatagacttcaaaggttactgccacgttgataatgtacatgtactgcagtcgtgcggatgaaacgagtatgcttgtatacgaaatggataagttcattggttttatctacagaggatgcactggctgcttacaccttgtcctacaccgtcgacagtcgggacatggaggatggagaagtgtggcccgacgtcggtagatcgtgcagcatgcgcacggcctcttcgaccgagatgctggggtccttggccaggatgcgcttgatgatattcgtagacgccacgttgtcgtgcaggcggctcttggcgttcgcgatggcgaagctcacgccgcgcaccgccagcttctcctgcatgtccgacaccacctggatcgtcgtggcgtccaggtcgttcatgttgcatgtccagcacaaccccgcgcgtggtgacaccgtgcgcctgaagacgaaccatctcgcgctcagcgaagagagccacgcgctcgcagttggcgaagtagagcgagctgtcgacgcggatggcgatgacgtcgcccaggtcgtgcgcctcggagaacagctcgcggtccaggaatcggccgttgtcgagctctccgaggatcaccacgggcgacgtcttggtcttccacatgagcgccagcacggagcagacgatggacgcgataaggccgtccagcacgcccagacccagcgtgaggatgaaggacgccgtccacacaacgaactcgtcgcggttgacgcggtagagccacttggcctccttgaactcgaccagcgagtagccggcgacgatgatgatcgaggcgagtgtgccgcccgggaggtacgccattgcgccggtcagcgtgtgcagcgcgaggatgacgatcagagtagtgatgatcgacgagagctgcgtgtgcgcgttgagcaggttcacggctgtgcgggacatgccacccgtgggggggcatggcctggaagaagccgcacacgacgctggcgatacccaggcccgtgagttcctggtcgcagttgatgtcttcgccacgctgaatggctagacgcttggccatggcaatacttgacaggaacacgacgacgaccacagtcagcgagttgtacaggatcgttccgaagcggtcgccgtcaatgaggcccgagtcgaagccataccagggcaccttagggtcggggaatccgccggggatcgaacccgtgagcttcaggcgcgatgagccaagcgcccaaccgatgatacctccaacaatgcacaccaccagggggcccaggtcacaaatcgtccgtacgatgaagatcccaaggagcctagtggtggacttctttgggacttcatccgccaggttcttctctgcagcttcggtcactggagtgtagtcaccgcgacggtggagcgaagtctccatgctcacgtactgctggtccgtgagggagaagccatgactgtgcgagacctcgttgttcattacgggcgtctggatctgctcgatgtcctcggacttgacttgagcgtcgtccttggtcggcttgtccggctcgaagagctgcatcaatacaggggacgggaagaagcgcttcttgaagatcttgactccgagcaggtacgcgatcgagatggcggccaccgcgaacgccgtcaagttggttttgccgatgtgcttgaagatctggtacaccgtctgcggcgggtagtcctgcgacgggaacttgatgcccaaggcgttggagaactgcgacagcatgatgaggatccctccggccgacacgaagccgcccatgaccggccgcgagaagaagtcggcgagctggctcagattcaaaacgcgcacgagcagcaggatgcagccactgaggaaggccatcatgatgcccgtggccacgcgctcgtcctcgtcgtcaatgtcctccaggatggtgccgaccagcagcgacacctcggaaccgctagagaccgacagtaccgtgctggagccgaagatggcgtacaccagcggcgccgtggcggccgtgtagagtccgtggtgggccggcacgttcatgatcgtcgacagcgacacctcctgcgggatgagcatcatggccaccgtgatgccagccaccacgtcgaacttgaggtccttggccacgttgtagcgcggcagctagcggaagatcggcgcgtagtgctgcagctgctgcccccacgtcctcttgggcagcgcgaagcgctcgctctcgcggtggcccgtgagtcggcggacgcacgacgccatcgcttgggatcagtctgcggtggacttggacttgagctgcgcgccgcaaaagctggaatgggtctgcgtgtcctggatcgattcgaggtggtcggtctcagctccgcttcagccccgcgcggagagacgtggccaccgcagacgactaatgcgactaggacacgcgccgagtacagtaatgcttcggaggcttccgtgctcgccaatgacggcggcgaatgcggtcgaggtggcggggtgggattacctgatgaaggtcgacggaggaccgagtgcaagcgtttgtcaggattgatgctgcggcagccagcaagatgcaggcgccgaagcagcgctgagagcaagcgaaactccctgctgcgggtcccgaacgcgctcgcaagcaggatgacagacaggcccctcgcttgtcgatagcgtttggggtccgacatgtaggtagagtcggtgctgtcggtaatagcaatggaggtgagccccatcaaacgatgacaagccggactgggataccaagcaggaatgccgagaagctctgcaggtgagccttccgcggggaatccagaggatattcgttcctgggacggcatctacctgaacggaaagtcatgaagcgcggcggcgcctgactcacggctgcagtggagactgtcggtcggacttcgagtgatggacagatggtggtctattcaacgccggaatgccgtggcgtgtgtcgacggtgctgcgcagcgtcattggcgtgcgctgtcgccaatgcgggccccagaatacagcacgtcaacacgcgagccccttgcgcaccaaggtgtccacataaccatccttttcggctgcctgctccatggcatcgcacgacgtgctgtggcagccgcccgcgctcaagtcagcacgaaattcctgacagaaggagccatcggagcaacaggatcaaagcaaacaagcagcaactccgagttttaccgccgccacgccagtcagttacccatcctatccgccgcagggctgtggaaaatatgattgcgattgtaatccaagattgtcaatcacaatacctaagtaattgattgttccgtgatctcaatcgacaatcccgttcccatattgtccctttactgattttgaggaatggcgttacagcaaccatatgacgataacacgacagaaattaaagcaaccacaaggcctaaagcaaccctaaaaccagctggcacccggtaatttattttaaatgacgcgtaaatgacagggacacgtcgccctcgtcatggtcttgctacatatatctctaaatttagacacgtcgtggtggcgtctaactgatgttctctacacagcaatacgtgaaacacatgacaatatgtgtcccacattttcaacacttggcagattttgagcgacagcaaaaatggagaagaaatcgctggcacatgagctggtgcgcgcgagaatcgccgagattgcactcctcaagaagctggatgagcttaccgagcatctggaaaagcttctggcagcgcagctacaaatctaagccctcgtcgaagatcgcgaagtaaacagctatgcgttagcagccgtctcgggcgatgaaggggccgaccaaggtggtctcaccgcagaggacgacgctgtttccctcgatgttctactggagctggcggtgcgaaaaatgaaagactaatgcagcatagactctgtatttaaaggtaaatacagactgtggtgtttctcagagctggttctgtagctggtgatgaatctggctagttttagcgacgtcgcgttcagagagatgacgttcttgggagtaacacatgatgacccacagcattttcaatcgcatcaccttgacgtcgttcttggaaattctagaaagttgcatctgcaagttccccgtaagatagctgtgcgcttgggctactaccattacaccacagctagcaaaatcaggttgttgaggggcacagatccactcaatcggatcgaagaaaagatggccacgggggtcagaagccttgtgccaccgttccacataaccacgaagcccctcctttccttcattttctttgtctttcggaattccagtccacacgatttccatttcatggtgatagtcatcatcaatgagcggctcgtacatgtaaacatgcacccgaagcttgcttgttttttccgtgtagcgtaggcgaacgataattacccccagtggtctgcgtgcagattaacagggtggataataaaattcgttgctgcaagtgctgtcttagggagacttggccatccgatagcccatgtcagtgatgacagcacatggcacttccccaccgatctcgcaagggtctccaagcaaaagtccacagggctatcatttagccatccacgacacgatgttgtcgaagctgatcacgactttgttggagagcgtcacaaattcagtgcgtagcccacttgaagtaaactttgagataatttcgttcgctagacctcggtgccgctcgggaacagcatcacgcggtagtcctgcagttgctgtctccgcagcgaaaagatccacgatggagtcaactttacgccaatcttgctccagccactttcggtccttcaaccatgaggtacacttcgccttgatcgcgtagaatcctgttagagcacctacatattggctagaaacataagcatcttaaagtaaccctattaaagcaaccatatcgctaaagcaaccatacccgctaaatttccacagttttggatccatcgccaagacgacgtcgagaacaagtccttgcttcttggccttttcatccagtacaattggctgcttctccttccgggtagtagtcgttgctgcctgcattgatagggcgaggtcttgtggaattacaaatgtgtgcatgtagtccgcaggtcgtacaatttctcaatgacaatcaatcttccgagctcttagataggcatcctccagctgaacaggatacttcgacagcatctccatcacacgcttcagatttgaggtctttctggcccaaatcaggaactgatccaaagtcacggcaagttcagtggggtacttgtgaacagcaagacggtcggctttgagactgatcgtagtttgcctcagctgtttcggagttgaccttgacttttcttggcttggtggcttaggaactctaacgacatcgacctggcgcacgcgcgactctgtgtcaggcttcgtagtgcttgaaaccttgtcacagctactcattccgcagctggcatgagatttctcgtcgatgggggggtcgaattggagatgactgcgaaaggtgagtgcgttgtgtcggtaacacactttcgtcggactcgtagtcgccataattcatggtcatggggctgctttccaatgcgtccatgagcgtcatagtccccattgcctccacggggtccagaatggagtctgagacaggttcagatacatcttcttcttgcttgctatcttcagcagattctgtagagctcggttggggggcagggttgacacggttgagccctatgtcgatcgtttccttccaggcacttagctcttggtagaagtctgcactagacaaatctgacaggtgttccaatagcggttccagcatcgcttttgcgtttgcgtatttttcagctgaagacaatacaacctggtttgcccgttcacctcgccgtagccgtacgtacgcaacttgcttcctagctttggttggcgaagcgttacccccgcccccccccccccccagcataaagtggttgttctggttcagccccagtgtcgttcggcaactttacttccggcaaccttaacttggacatccgcacaattggctgtaacatttccgctgcagccgtcaattcgttgttcacttccaaggtctgctacgtactccaccgatcatgaattgccatagctggaagcagtttgaagcctcgcgtgctaagtgcataagatgacgacatggtaaatggtgactgctacaaaatagacaagtacacgtccactccacatcgtgacagcgaaaggtttgattcccgcaataaattttccattgtgaaggactcgacgctgtacgctcacaagtcgcatctgccatgaagttcacaaatcgttcccactcttttctcactttctcgaagatgtcagggtacagtcgagttgctaccgtccggagaaacatcggtatggttttaggaacgggcgaagtcgaatggtgctgcgcgatgacgaactcgatctgatgagttatcatgatttgatgctgcaccaagcccgcaatagtcttgtcaactcgtgtcttgtgccccaacagtattttcacttgattccagtttgactcgatcctgttcgttgtagtattcccagccgtgaaaaatttgctgcgagcaaagttcgcccacatgtcacgacacgaatcccagttcttttcaaagtacgagaataaagcttgtttcttgttgtcttcgcagtattggttcaatgcaccgtagctagaatcgtaacctgtctctgtggagctgcatatggtttattttccaaagttagcgttaccacaagaatcataaatagaacctgttgcgtacctgtacagcgttttttatcatcaggttgagtaactcgtcgcgttcagacaccttcagcttgtatggggcccgctgcatcaccttcatccagtacgaaatggcatggaattgacaaagtaaaactttcgcagcaggaaatagtgttttcagcaccctccactcaacgaaatctttgtcgatcacgatggaggatatcatccgccaacttgggttcttctcttggaaatactccaggattgttgtcatcatcggagctcgttggttgaggcatatgaagtctacaactgggaacccactaccagtagcggttgtgacgacaagactccctgaaatatccaacacacaacagtagaaaatcactttgttaataaggttgctatatcatcgatatggttgctataactacgcaaggttgccgtaacaaagataaagttgctataccgaacaactcatacgcacccaagtgatagcccaaattgttcgtgccgtgagtgaaatccatcgtaagagtgtcgccccagcgctcgaaaatcaacttctgcgcctttgtttgcatcacgataccgcatgtcacgtccatttggtcttgaattacaaggacgtcactaccgtctaactgacggatagcttgcagcatgtctttcaaacgggcctccgctgcgtcgtgtcccatagtactgcggatcagattacgggtctgttgaggtgttattttgcagcctagcaaacacacaaagcgcgaacagtaacgtaagtatcactgcagcatatcatatataactacgtaccgattctcaaattcaggaagttcgtgatgtgcttggaagaaacactagcatccgttaaagtcttaacatcttcgagatcttgctcgtccaacggaagtgtctttgttgtcaggtacaacgatgcttgcgttcgggtggtcgggtgcgtgtgggtaaagttctggttatcaatagcgacatgtgagaaatactaacaaagcaaacaaatacacgaaaaggcagatacctcgtttcttatgacaattcgaaatttgccattttccatccgctgaacggttggtgtcatgcgtgcaggacacccgcaatagtcgccttttctattgcgatgtcccttggagcgcaacgcttgcgaaacaccgtgtgtacagcggaggaccttgtgactccaattaaaacgtgaagggatttggtcccgatgattgctgcatatgaaagggggtttcgttaacaacttaaatttctcatcaaacagaggtcacacatacctgttgtactgatttcgtgtctccgagcttcgtactcgaaacttgaggtggtgcttctgcttgtatattttcaagtgtgcgttgaacttgctccaactcttgataatcgctggggtaaagggcggaacggcgttgataatttcttcgcgctcttttttgatctcccgcaactcgtcaaggtgcttgcttgatcgcttccgcggtatgtactgcttgttccgcttggataaacatggggccgaatcagcgtcgacagactcgtgaagctgcagctccgccttacgctttttcgcgaaagattgggcttcatccccagcaaaaagcttgcatttggccagagcggtatccatcgatcccaaagtgaatgtcaatattaatgatagcgcaacctttttgcttaaagcaactttaacgagaatacctggtgttttcttgcgtgctgtggctttctttctcggctcggggctctgtttgcgtgtcctgcgttctaaacaaactaaaaaatacccaatacattatcagttcaactcaataagtgtcaacaacaacccaaacgagtcttacccgcttctgcttcgtcttcagtgctggattctccgtcgtcgtctgcctcctgttcatcgtcactcgcctcctcttcatcgtcgtcaccctcctcttcatcgctatcgctctcctcgtcatcatcgacctcttcttcgtcttcctcctcttggtagcaatcctccgcctcttcgtcgccgttgtcttcctcatcctcctcatccagtacaaagtcttcgtcgtcgtctttttcaatcccaagagcggcgtacatgtagtttagctcctcgtttacgttccgcagcttttggcctaaacaatacataccgacagaattcaaacaaaatgtgaggcacgtagatactctcgttgccaccaacatggagcatactgattaccgtttataatggctccccccgcaggagccattggtcccccctcgccgtttggtgcttgactgattcgcgagaggtgcgtgccccacgtggcctccgttcagcagcgcgattcttaaaatgagcggctgtgaggtggcgcacttaatgacatcgtacctaatcagaagcgcactttagcgtgatttgcgtacctaagggtttaatggcaatttaaacatttaaattacgctcgaaatttttgaaatccctaaaagcaaccatacatgtctcagaatgacttaaagcaaccatacttatggttgctctaaccactcccgattttgagcctttgccagtgatccggtagcgcaatatgcaactccaagcccatggaaccgatcctagactcatcaaagcctttctgtgtcttctgctacttcgaaatgcggaaatgaggggtcattgggtgcccgaacggggtacacgctcaacataaggaatacaagacccaacatcgccttttgccaaggcttttgaaggttaacatgtatgcaattgaataagcacagatcttagggcgatagcgcccccaaacgagtaaaaatatgaacctagcagaggaaatacaagcgaaagcttagattgcaatcttttgtttttgggattgtcaagattcaatgattgattgtttcagatctgagtcgccaatcaataaacaatctatatttccacgcgcattcgggggcgagtcgatatccgagccgcactccttgcaccgggtggcattgcccttcacgaactccttacaatagggacactgcttcttgaccagcacgttgcgcttgaacaccacctcaaacactgcacacaaattcaattcaatggactccactcaaagatcttccaacgtcatcgatcgcacccaccttttttcaccgcgaagaacaggaacacggcgttgatgaggaagttcatgacgttctccacgaacagcccgtagttgatggtcaccgcgccggcatcccgcgctgcaacagaaattacatcaacattagacatacccttgcgcagtggcttatacgttcgtggtaccttgcttccatgtctcccacgtcgtgctcgtgcacccgattgcactggtggggcaccgcgcgggccagtagtagttggcaaggctgcgctctgcggcacagtgtacaattgtcaacaacatacctacctttcattgtattgtacggaatagtgtgtacccgagaagaggctgataactggcgacaggatgtcgaccacgaacgagttgaggatggcggagaagctcgagcccaggatgaggcccacggccaggtcgatcatgttgcgctgctggatgaagtcctggaagtcgcccagcatagcgcgcacaccgtccgcgtggagcatcgagtattcctggagacggcccaagagcgacgtgctctcgggtgggggcggagggggccgcggcgtcaagaatcgtagcgggttccagcgcatgcttgtcaatttccgcctgctggaagaacgcactcagatcgtacttagatggaaagtgtagccatatccacaagttgaagagggctgctccgaggaacttgacaagtaaaagcaggctgcccctgctacagtaattcgaggcgagatgaccctgctaccaaatctttttcacgcggatctttccggatcttcttaccgccagtcgtcgcgcgatccaaatcggacggcccatttagcgtgtcatttctcgcgtgtcattatccttttggcgtcgtcgtcaaaccatgccatcctctcggtcgatggtcgctctctggctggcagccgcactgctttgcctcgctaatggccagcaagtcggaacatcctgcccgcagcctcgcatccgcaagtcctgggactcgtacactgccgcggagaaggccctgtacactgaggcggtgggcgtggccatggatcgcggtttccaccagaagttcgtgcagatccacacggagcagctcacgggactggaagcgcatcagtcgtgcgtcttcatctactggcaccggatgctgctgctgggctacgagaacatgctgcgtagcctcaacacggcgtatcagtgcatcacgctgccttactgggaccacctctcgggatccgctcgtcaggcgaacaacaactgctccagcatcgaagagtgctcctctattatcgccgactttggcggcacaactactggagtgagcaaatcgctgtcggtttacggctcaagtatccccaactcgatcaagacggtctgcgtgactcaaggcccggcctaccgcttctgcgggaacaacacgggatgcgcccactgcattctccggacacgcagcaaatacctgagtgccacaacgtatccgaacgaggcgtccttcgggtcggtgtaccagcaagtattcacgtacagcgactcgggaagtttcacctctgcggtcgagcgaggcatccacagtacgtacccctgctacgatattttttaatgcaacacgctaacttttgtcatctgcagacacgattcacaacgcactgggtggagtgatgacgtacctgcaggccccagttgatccggtgttctactctcatcattcactgatcgacttgctccagaccatctacctgaagtgccagattggcgatgagaaagcttttctatcagcagaaaacaaaagtagcgatccgcgggtctggacgtcctgcactcggtccaatggtgggaacttccgggactcggataatatcaccatgcgtgcactggcgaacgatggcaagacatacgtgaacgtctggcaggacccgaacaacattttgtacccatttttcaaggatatgccgtaccagtacgctgactacgtcgacgccaaggacctgaagggctacagctacacgtacgatatcagcggcgggctggccaacatgtaccagaactgcaaggattccaacaccttcagtgcgatatcgctcctcgcggatagtcagcagaccaccaagaagaagaatccgctgcttccgacgatatccgagggcacggaggaggacgatgcagtgcgcctctggcacattgcgttgtttgaagctgcacagattgtcgggttccaagactgggctgcgagagatcagatggagatgattgcgtgcgtgcatcatggggagtgtatcggccctatcgacgactacaccaacctgttccgaaccaactttggagtcacgggccacacgcgctgcttctccattctccaggacatcatggaaggcacgcgtatcatcgggattccgatgtggcgcgaaatcacgagtcggttcttgccctgccctttgcaagaggaagatggctcggactcggagggaggctcggaagccgcggtggcataggcttttcttgcgttgaggtcgaagtgggagataaccaatccttcgctgccttgaagcagccatgttatgcatgtactcgtttgcctatgataacccccccagcaaattcgccagcgtgtttgtccacaggtcgaccattaacgttaatataattgttgtaatacgcaagatgatggagcccaaacggagattcaccgctcgttcagtaagtaaagtaccacgaagaaaattagcaccggatcttgaacaacggcagctcaacgagatacatgcacgggcttgagctcgaatctcgacgtgcgtggatacctagcagcaacattggggctttcccaaggtgcaccatgtcgcagtgatcgacgggcggggatgcgtcccgcgcaggatttattcgcagccaccccaccacccaccattagccagtggcccgcatcaacgccgagtgaaggtccttcactgaaagacaccccatcctgcctctgcattgctcagcgccacgttgctttcgccgcgttcggggacagacacggcaacaacttcacgagcgtttctgaagcgacgtaacgagtggtgcagagcgatttttctgtattgaagtgctttgtgtgcaaaaccggggcgacatccttctctgcgtcctgctttaacagttccattatcgacagataccaatagacaaaggagactgttctccggacacatgacccggttttaacagccgtttttatttcggggtgcgttacaacaacaaccgtcagtctccatttagcccgacctcgagcacacctcccccctccgtcaccatggtcgagtcccgccatgacgtcgagcaggggctcaccccgcggctgagcaatgcctcctcctcctccatctacttccctcccaccaacggcaacgcccccactgccaccgccggctccaagcagtacatggcgctggagcccgtggacgccacgcactcgttgcgcacgcactgggacgagagcgtcggccacggcgtgcgtcgcctcgtgcgcaccatgcgccagcatgcaaaggcgccctccgtctcgaccgccgacatggccgacaagctccggcacgacgccaaggactcggcgcgcttctactggcagaacctgctcgtgttccagcgcgagatgctctgcggcgtggcggccatgctgctcatgatcccggagaccgtggccttcagctacgcggccaacctggacccgctcaacggcctgtacgccacgggcttcctcggtctggccgtgagtctgttcggcggcgtgccggccaccgttgccggcgctgccggtgccgtggccatggtgatgccgaccatcacgagcgtcaccggctcgctggcctacttgacgtacgaggagcggctacagcacctgttcgtcgctgtgaccgttgcaggcgtgctggagctgctgttcgggctgctgggcctgtccaagctcttctcgatgatccctcgcacggcgcacatcggattcctgaacggcctggcgctcatgatgttcatctcgcagaagacgacgatcgaggtgtgcaagaacgacacgatgcgcttcggggagtgcgagatcgccggcaacctcgagtggatgagcgagtcgtcggctacgacgtgggtcccgttgcgctggtgctcgtgaccatggccatcatgcactacttcccgcggacgccgtacgtgggccacttgatcccgcccacgctcgtggcggcggtagtcggcgtcggcttcgagtttggcatcaaccgcccactgctcggctacgacgtgcgcactatcggcgatacgtctcctctgaacggtggactgccgactttcgctctccccaagttcggagacgtgcaggactggggcgtcgtgctgtctacggcggcgagtgtcatggctgtgggactgtttgagtcgctcatgacgttgcagtcggtggtggacctgaagaaggagcagctctcgcagacggccacgcgcaaggagtgcatcgcgcagggcatcggcaatgtgctgtgcgggttcttctccggtatgggaggctgctccatgatcgcgcagtcgaacggcaacattttgaacggagctcgctaccgcttgtcgtcgtttatgggaggagtttatacgttcctggtggtgtttttcgccagttcggtgatcgagcgcgtgcccgtggcgtgtctgaccggcatcctgtgcgtaatcgtgatccacacgttctactggccgtcgctcaagctcatcttccgcgtcaagatcacggacgccatcgccattgtgctcgtgacggcgctcgcggctgcgatgaacctggccattgccgtgatcgtcggcgtcatttggcagtgtctggtgaacggctggcagagcggccacttactcacgttccgcacgggcatggaggtggtgcctgtcgtgaacgcccagggccgcgctgcagacaacgagctgctcacgaatcacgaggaggccaagatctactacatcaagggccagctgctcttctcgtcggtggcctcattccgcgagttcttcgacgtcctccatgacccgaacgtggtcattctcgacatgtcggactgcgtgttcgccgacttctcggctgctgcggcgctgcgtgaagctgctatgcggtaccgtgacgccggcaagacgctggtggctcgcaacctcgacgcgcagtcgctggacatgctgaaccatgacttcggctgggactctgtcgagaggattcagatcgcgacgcccggtacggccaccaacggcgacgaccttgccaagagcaagatcgacaaggagcgcgcttctcgctactcacagctactcacacggctcgcaggcgtctcgtggttcgctgcaccagcttcacattccgtcgccgtgcgagtcgtcgacgccctaccgtcctgctactgggccgtaaactttttttattatgccaaagcacaggacatccgacacaaggtttcgccaacgcagggtcgtaagatgccgcagctctcgcgattcctagtacacttgatgttgttttgaaattgcaatgatgcaatgcaatgatttacgtgttcgcgtagccaaattacacctgcgctagtctcagtttagctagtcggcggcatagtgtggtgtccgcatacgtcgagtctcctttggctggcagtgagtcagcaatggtagtcatgagggccttccatttacgtcggtcttgggcaagcagtcgaagtctctccaagtctgagctggtgcggaggcggtagccacacccactagcatcaaggtcctggtcgaggacaagaggcagtgtggcgcggggcctacctctccacttgctgctgtcggaggaagagaaatacgccttcatctggataaacgccgggatatcttgtagtcgccgtagaatgtgcccgagaagcccccacctcgcagatgtgatccggtgacggagcggccgctcgtcgcacgttgcgtagagatcagcgttttgaaattgtgtttggttttccgtatggacatttttagggtatccataaagctgttcatcttccttgacttcttggcttggtacactcctggccacaataatacggccacccctaaaaattaccataactccgtcagttttgcttattatgcggtgctgttttgacacaagtagcaaaacacggtgcaaaaggcctgacatgtgttaacgctcgcgtttttgcaatctaacgggtggctcacatacaaaaaaactgttttggcaaggtggtcacaacttacggccaccccatcccaatacaaaatcctatactaattgaatgcttgtacagagtgaaggtcgggcaaataacttgagatttgtatgggtctagttagtgaacccgctagttgggctaaatcgcgtcctagagaagaatgaaggcattggtcatcttagcataagtgtaaactacagctccagtaaattgcgcgggacctcgggtgattttgagggagatctagatgccaacgtaaatctaaagtagcgtcgtgacaacgtccatatgatttgtatgggacgatttgatcaggaagtgacgagtcgaatcgtactcgtgcgtgcggactgaagcctcaatacttgttccaacttcggttaaaatattatctacgttacttgttgctgctgcagtcatccattgtcctttagtacgggaggaagaaaggtttttcaggttcactaactacagcttttcaacttcaaaacggcaaattgtaagttcaaaacagcaaatcgtaaagtcaaaactgcagaccttgcgaaaatcataatcgaagctgtatcgcctttgacggggaatactcgggtacggtgcctgggcacggataccctctggttagcactatattggaggctctcccgatgaccaacgacatacaaattcaagtcaaaaatcatccggatagtgcttagtgatacgagattggaatatatcaccatcaagagaccattaactatgagaatgtccatttcgtaaagcatgtccggcaacatcaactacaacgtgggtcgcttgcgaccttgaaatggactcagattctctgggttcgcacatattattattaagttttaaatgatgtgattctggaacgtgcatttatcgtatcagcttgggcgctagactacattgctgcctgtgcagtcctcccagtcccacttgaatagtggccagcgtatcatcactcatccagccatatagtagtaaataagcacataaactacttttatctagtgctttgatcacgtcaatacaagctcaccaaatgcctgaatgatggcattatcactacactggtaccttgaacgataagataccgccagtttggtacagatctagatagtgatgcctctgcatagtgataaaaagtggtctcccgaggctatcactacaaagaggattgtctgtacacttgtcatcatcgaatgcgagccaagcatacggtgcagttgaaagtatgtcccaccgccccgcttacaaggacggacaaacgccaacccgccgtaaaccctcaattccctcggccagccatagcaactctctcactcgcgaagcactttgcaattcgcttgctacccctcagcgcccgaacaacagccgccaggtcgtccgacgatgcgattcaactgctttgcagtcttggccgtcacctctctgctggcgtgcgctggcagcgcctcgacgtcgtcagtcaccaagacgatcgagcacgacttcccagctgccatcctctcggacgcgaactacaacaatggcgcactaggcgccaagagggtgttgagggctcacgaaataccggacaaggagaacgaagacagaatgttcaattgggcgaagtcgaatgcttggtccttcaaagacaaatctacgagtaacgtcttgggaaagatcaagttcgacccgaaagtaggtgaggggcttgattcgtctcgtttgaagactttggccgagaacgtggacatgttcaacaagaagcacccaaaacacaaggtgtcactgttcgagactctcaggacgagctacaaagaggacgacttggcaaaagcgctggtgactgcgaagcaaagtgaaagtacgagggaaatcgcgacgcggctggaacagcagcagtttgtgttttggctgcatgagaggatttcccccgacgacgttttcttcatgctggggatcaaggctgatgcgcaacacgccatgcacagccggaagttggagacgctggagcagtacatccccattttcaacgagggctataaggagtcacgaacggacatgctcaccgtattgagaaacggtttcagtgacgctcctttagctcgcgcacttgcgatggccaagcaggagcattcgtcagcaactatgcttaaaaacggcgaaaagtatcaaaaggagttgtactcgaaatggatggcgatgggcaaggataacgaaccttttgacacgaacagggttatgaccgaagtgttcaaactgagcagctttaaagctggtacccctgcggataaactcgctctcaatcactacagcgtgttctacaaaaagaatgcgcgaacagaaagctcttaagtcgaccggcaggtgaatttaatagtaagccccgctgcattcgctttgcatcgaatactggaagtattagctaggacggacagctacaaaagtacgctgcccattcttgcaggtatcacccacaatattcggtaactttccgaacgactccaccatctcacgagccttatctccctctaatgtgaaagactgcgtgttcaatatctcagggaggtggcaggacagcactaaatgaagacaaattgcagcacaaaaaaaactgcgttcaacgtttcctctgcctggacgtctcgattcgatgcagtcctcttcagtaaatgtgccccccacacacacgcgtttcctctacataatgaaatagctacggctcattagtcgggcggtacgccgtcgacgactcgggctacggaatgtggagctggtgcaacgatcccgagggcgcctgagagccatggagaaaagcgctccttgtcgatcttgcttttggcgaggtcgacaacgtgcctggcaccagtcagatccctgcttccgagtagatcattttatcagcgcagaattttgggacacattagcagacgccgtggctgctaagtagacgcaggtgatgcccgagcgtacgaatattcgttatatttctaacacggccttttttgcttagtggactaaataataatacttaaattaactccactctcgacgtattgtgcctttcacgtattttggcgggtgagctgtagattcaggcgtaattagagtcataaaagggcgatcaacgcttatttacagctaattctgcctaagattgtgagcgcttcccctaacatccgcaatcagcatttgagagccaatcgacggagatacgagcagaatggcatgaattggcgggtaggaaaccgccaatcgctctgtttccgcctaacgaaggctggattagcttattccgcgttagctcggcctcaccatcgccgctcctaattcggccatggagggacgacccggaattaatatgagaattagctaactcgggacataattaaggtcgataaggaattagagttatgccagaattatcacggcagaataagtgaaaggcacaaccaacattagctcaaatccttgtaaaaatgcacatgtagcttcgagttgcaaaattctagtgtctacaacccaggtccccattctaaatcgcacacacatacaagtagctgtaagttgtggatggtcattcagccccaagtagtgtacataagccacatctcgtgcatatttagggcaataccttttggcgtttctagaaagtgtcattctctaatgttgtttttacaggacattttgcaggtgcgcgagtcttagtacaggacaaaaatcctgttacaggactccccttacctttcgatttgaaaaatacaggatccctatgcttctgttacagatagtgttcgcacaaaaactaattgcataactaacactagcgctagcaagctgtttgttagttcgatcgtattagcaaagtgacaaaatgatcctcaattcaaaaacaaacaaaaaaagctgtttgttagtgtatagtgaatctgggtatcatggttgcggagtcaggcgattttttatcaatcatcttaacgctctttttagttgtcgaaagctgcttcgggtacccgaatccgggtatacccgaggcgggttcaagaaacgggtacccattgcgagccctgccgcttaccaatgcgtaccttagatttccactatcgctcacggctgggggccacaaatcattcgtgttcgacttctttaaggcgctccgggccggtgcggcctggagcagtcccagggtgaggtgcggtggggcaactgctgccttgtaggtaaaactacgaatgacttgctagactacttctactacctccgggtgctgggattgaatccatgcgacgcgccagcgcatttgggatgtagccacttggtgcgatgcagcacagaccgatctgagcagcgtccttggaccacaatagcctccccgctcagcggaaaactggtctccgcccacaacaaggggcggaaaccttaattccatgcacctgtaattctacgaacatcataaggttgaatagataatattatatagtgtgaggagctggtggaggagtgtcaacggggcgggtgtgcgccagcgaggaaggcttcaatctctaccaagcgcaagtcgaaggctatctgcgtcagcacgaatgctgggacgttgtcgaaggcaacagcgctgctgatcccgctaatccgcagcgggcagagcgaaaccaatttgctcggagcgcattactgtacggcatgctccccaaggactcgaagaaggtgtgcagaatggcaagcgcgcgagatgtggaggtctttcgagcaagacaagaccaggcgagcatacgccagtgaaattcgactacgcagtaagttgtacaccaccaagttctcctccagcgaggacatggagaagtatttggagaagttggaggacatgaggcgtcaattggctaatatgaatgtatccatcactgatgaggagatggcgaggattatactgcaaggtgtggtggattctcctcgcaatgtcgttcgtttattcaaccgagatgctggtggtgcagcacctgacttggctaccctgaccaacacgctgcttggtgaagctgagacggacaaggcgtgtgcggcaacttctactcggagtgatgaagcaacaagggtgatggcccagcgtcctgttccgcagaacctgaaagacaagttcaagaagaaaggaggcagcggcaagaaggtgaagcaggagaaccgaaagtgcttcttttgtaagaataaggggcatccacgcgctgattgctatggctcgaaagctctgaagaagaaggagcagaacgctgacgagtctgagaccaacagcaacccaacaggtatggagtggagagcttggagactttaacaacctaccagttccgattcgcatggcgctgggtgagggtgacattcgttgcactgcagacagagtgcacgactggatgctagatggtggtgcaggggctcatgtgtgtgttgaaggtgggtccttcgtgaagatgaacagagacccacttctgacacttgactggaaaggaggagtggatttcaatgagcgatcggggacgattcgactgcaaatttcgaatggatcgatccttgagctgactggcgtacgagcccagaggtgccatcaatctcattagccagctcacgctggagcgtaccgggtggaagccatcgtacctggacaccgatgatgaagatcagcgtgtcaagtacttcggcaaggacgatagtcgactcgagttctctaagaaggcggacggtttccattggatgaaggcgagccctatgttggaagccgcgctgatgatgaaccgtcaagtggagacgttggagaacaacatcgtcatgaaatggcacttgaagctggcccatctgaatgaggatgccatgaagagaatggtaagggaaggcttggctgatggcttgggcgggttgattttgaatgactttaggcggacgccgctcaagtacattgcctgtcaagaagcaaaggacaagagaatgtcgttcaagcgccaacaagggaagcgtgctactgagtgtggagcctgcatcagctccgacatctattacgactccgggtggggcaaagtcctttcagctcgtgcaggatgaggcgtcacggtttaagtggacctttctggttcaaaagaagagcgatgctaaagcgaacattctgaatctgttccgccgacttgtgaaggacatcaaggtcaagttgtttagatctgatcgcggtggtgagttcctgaacaacaagttgaatgatttcttcaagaaacatggtattgggacgctgcctacaaactcttacacacccgaagtaaactgtttggtcgagaagctgaatggcatgctgcttgtcaaagcccgcgcaatccgagaggcagccaacttgccgcagtgtctgtggggtgaggtcctgcactatgttgttcatattgacaacatgtgctcaacgaaaactgtcggaggcatgacgccgtatcagaagctgtggggcaagaaacccgacctcaagaacctgaaagtgtgtggctgtttggcctattaccatataccgaaggtgaaacgaggcaacaagttggagatgcgagccaggccggctgtgtttctcggcatggctgaattatcactggattatcgcctgctggaccttgagactggcgacatagtggagcggcgatctgttcgttttcgagaggatgtagctgttgggagcgactatgtggagaagttgctggccaagcgctactacggaaagcggacagtggtgccaagtgatgtaccttatgtcgtgctgcctgtgaagcaggttgctgttcacaatgaagaagtgcaaatgcgtgaacctgaggttgaagccgcagaccagcttgaagagaaggcccccgctccaggtgaagatgatgtggacatgagtagcagtgatgagagtgagtgggaatgcaatgacaccaccgatgaaggaggtgaccacgttggagcttgtgccggaacagagtgccgagtgaatgcacgtcctactacggcatttgggtcaagtgggagctcaaacccgcaggttgttggaacgagtgagagtgttagttcggctggggccgctgcgtcaagcgcaagcactgcgagtcccagtggtcgcgtgagtggaagctttggtggcagaagcaccgcaaccgtaggccaagtgccatcttgtgctagcaacaaccagacgccgcctgcagctccgcgtcggtccggccgccaacgccgaccgaatagccggtttgatccaagcacatggttgatgacaatgactttcatgcagtgtatgatgatcggcgtggtgaatgagatcctgaaccccacgtctcgtaaggctgccttggagtcggagcatgccgcaggctggcaacatgctatggacgcagagtatgaagcgctgatgaacaacatgacttggaagctcgtgccaaggcctaagagaggaagagggcggcagcgcgcaaacattttgacttccgtatgggttttggtggtaaagcgaaacgagcgaggagaagttgacatactgaaggccaggcttgctatacgaggattaatgcagaagttcgggatagattatcttgcaacttactccccagttgtgcgagttgagtctgttcggcgatgttcctgggcctggactgcgtgcacgttgacttcgtcaccgcattcttgaatggcgagttgactgatgtgaccatatacatggagcagcctgaaggatatgaagacggaacgggtcgagtctgtaagttacgcaagggactgtatggtttgaagcaagcatctaagacatggaatgatactcttcacaagttacttgtcaagcttggtttcacacagtgtacgcatgactctggggtgtactggagacgccggaacggacgtgtcgtgtaccttaccatgtatgtcgacgacatactcgacgcagggacacctggtgacattgctggcgtggtgaaggaccttgcaaagcacttcaagttgaagaacctggggcgagtgcggcacctgcttggcatggaagtgaagtacttgcctggacgcatggtgagcatgtgtcagagggcgtatgttgagcgtcttgcacagaagtttggcccggcacaggcaaggcctgtgcgctccccgcagttccaccatgagaagaccactgagatcgagaccgacgagacgaagatcaatgacccgaagcttccgtacatagagatcgtcggttcgctgcagtatctcgtcgcttgcacgcgacccgacctggccaatgcagtgcgaaccctggggcgctacatgaacgcgtatacggtggagaactacagagctgcgcagcgagttgtgcgctatgctcttgccaccaaggacaagggacttgtgtaccgagtgacacctgagtttcctacgttggatgcattcgcggacgctgatcaccagtcgtgtccggagaccagccgatcggtgacgagctacgtgctacgtatgcatatgtttggatgtggaagagtcatcgccagaggtgagtgactgaatacacatgggttgcttgctgcgaatgctgcaagatggtgacatgggcacgtgagctggtgaaggagctcggattcggtgacccgtacccgcaagtaccggtgtattgtgacaaccagactacgattgcggtggttgcaaacaatggcaacacttcgagggttcgacacatggcgaagcacgcgcggtttatcaatgagtatgttgatgagaaggcgccgaaagtgctgtatgtgccgagtgcggtgaacctcgcggatgtgttcaccaaggcgctgggcccggctgagtttgagcgtcacagaggtggcctgaacatcaaagacgtcacgaaagtctgggcagaggttgaggcccctgctgagcgcgtggatgagtgtgcttcgacaagccaggacatggacggcgagatggaagaggcgtaacgctctcggtttagtactgatgtggcgtgatcgaaggctgttggtcacgcaatacatgttgcatgagatctgcatggacaacttggatatccaacttggaatgaagtgggagtacgagacttcagtggcaaggtggcacacggacaagtagttgaagttgaagcggttggagttagttattccagttagatatcggtaataaggaagagtgcgagttgtgagtggttgtgatcatgagggagaaggacagattcagaaaatctctgagtagttctccaggatggatctgatgtctcccttgcccactttgtgtgggccggagtggtcactggtaactgtaagggttttttggctgaggccttccccgatgaaacacaacgagcatcaatcacttttgaactttcaatcttgcagacaagtgttcttcgctacgatcggaaactagctcggcctctggtgctgaggcggctacactagttctcgcaagatcttctaccttgactcgttcatgttttccttcttgctggttccctctgtcggttcgatacttggctgccagtgaggcaatccacgcaagggatcgttgggccgtcgaccactccaggattagctgggtgcgcacgcccggcctgttagacgactcggtgagaatcgctcacgcagaaacagccggcttggacgagattggtgcattcgcggaagtcaggatacgcgatcgccgttgacgctcgtacatgtggtacaatactgtatcgtagctgataaattcacatgcatcgagaactggatcgtgttaatagcgcccttcaccaactctgtgcagtgataagtaacgcaagctctgtacactggaatcgtatgcgttgagccgcaggcaattcgggaatggcaaagctttcccattctcgaatcgaccgagagagaagcactcaagacctcaaccgggcatagaccgccaacatgcgccagggctactttctcctgataatagtcgctttgccacatgcatcccgggttttgctattgctgagcagtccaatgcccaccgcagcctcagaagcgccagtaaggtgcaagccgcagatgatatcgaagagagaatgcagacgccaaatatcggcaaactgagccttttctccaagaaagaggcgagcgttctcaagagtctgaagaaaaacccgaccttgaccaagacgctgagcggcaacccgtcgcttatcaagccttttgagaacaaccctcagcttggcaagacgttcgataccttgcaaaaggacaccgctctaatgacgaggatgaagagtttgaaaaagagtccttccatggacaagctcaagacggcgatcagcaagaatccgagcgcgctcacgaatgaaaacgtggaaaagcttggtgcggccgtgctgaagaaacctttcagcaaattaaaaagtgagcgcaactggaggatgtatttcgcgtgcggcgtgatatttttgctggtacttggcgccggggctacattcgcggcgacctcaggattgctttgaaacgaaatccgaaaagatcatgcccaatcgatataaaacttcgataggttagggaaccaatcacaccggtgaacatgaagagggtcacatgttggtaagataaaccaaaacacgtaagcggtcgaagctttacatgtattttcattgcaaatacttcgaagtatatagtagcgggcacgtaatacgttttttgtctttgagctcccgtgatctagtctcccccactgttgggatccttagatcttctccgaaagagctcgtcagcgtagtgtgttggggactgtttactactcacatggccgctcgcatccgcgacaaatgtgctcatccgctgtaggatgcgagtttgggccgttgatattgaaccaacgctacctcgaggtgcaaccggctgcgccacagcgtctgcgagggagcgcagcgattgactgtgtgttcgctgcagtcgatttcgcagctgatcttcacgtgctgtagttgagggtggcggggctgcagatttaggggttgctctgtacgcttcttccagctcgtggagtgaccgacgttgacgttgaagacgtttgcgcgggttttcgacgggtggtacatcattgggtgatggtggcgaagcgagtagtggatcagagggcctgcgctcctcggggaagaatgccgagtcacttggggatggctggggccctagaaccgaggcttctgtagtcgagaggaacttttcaatctcggatgggaccttgaagggcgctttcactctggcaatcggcggcagtcgagaaggggaacgttccggctgatagcgctggggtcgggattctgctgctgctgcgctaaacagttcgtcagcgtaacgtgtcggcgattgtttttccgtgtcaatggtagtgctcggtgtcagaccaattgctgatcccatgcgcttcaataccggcaagcgggggcgactcactggtgcgccagaaggctgcggcgtttgatttacaggtgcggagcgctttcgactcggaggtggggggatcatttgtgcggatttctgggctcggagaatcttcaaactcgcttgcaactcttgcaacgccttgaggataacgacctcccgctcctccacgttttgcaaccgtgcttggagggacaatggcggggggctggtccccggtggatgagaatgaaaagcatgttcagtgtcctttgctgggtccgcagctggaattggctttggcatggataggtttccgtctttgccattaatacgagtgcgtgcttttctgttgtttccatcgcttcgagccgttgcactcgaatccccgcaataggtttcagcctgctcttcgcgctttcgccgtcgtcgatcgcgtaattcaatgagctggtctcgaacgtttacccccacgccaaacttgagcgtaggatcctgtatctcgacattgatggccgtgtagatccgctcagcagcctgacgcgccgttagtactggaggaaggaacgatacgtgccctcctgcccttgcgcacacctcggcgatcgcgtcgggactgtaaactgcgcggaccatctcaagcagtggacagcgagattgagctgcctcatagctctgcatgaaggacgtaagcatgtccactacaacgcggtggcggtcctccgagtatcgcgctaggacggcctgaaaatttcctctcgagagcacacacatttcaacgtgtgtgatagctcgaacgtttgctgcgcgctggtaattcatcaacagcgccaggtcaccgaaagcctggccacgagaaatgaccagttcgtagccttttggtccgcggccgccattcttactgtaatatcttcgttgagcttcgtccagttcgtatgccgattgtcgaatgtcatcctcattttggccattacgctttcgactcgtcagaccaccgctttgacgggctgtatggagcccaagcccgttgtgagcggaggccatcgtagtcgtcgtgaccctctcgtatttgttcgcctcacgactgagctcgcagtagccgcgattcaccatgtaaaacgtcgtccacctcgccttgacgcattatgaagtcgtttggtagataacatccagccgcagcattaactgtttctggaaatccggcgtgcagtccttccagaacggaatatgcacgaccagttccatgtatttgaacaacacgacctccagcccgagcgtgcgtgagagctccttcgagaactggacgatgtctccatccaaatactcgtactcgtgccagagatgctcgtaatattcgtggattcgctctcgtagcgatagcggcagctgcagcttggcggtcatagcgaaaacctcctccatcttgtgctggtacctggtggtgttggcgttaagttggacacgagaatggcgacgtggccgaacacaaccgcgagcataatggagcccacaagaaccgacagcgacgcaaagaggttctgcccggaggtgtcagtaggcacgccctctccctgcaagagcaacagtgctgcgtagaaacttgcagagtattgagcttgccacgaagggttggcttcgctcgtatccccctcttctcgcagcaaaacagtccaaatgcaggcattgtaatgggcaatgaccatgagcatggtgacaatcccggcgatgcgaagcaggtgcgaaaagcgtgagtatagcatccacgcccagaaattgttgccgccccccgactggttggctcgcaccagccaaatcatgcgcacaaaacgtgttacgtatgcaagccgctccaccgtcagaatgtcaagcgcaaacgttacccacttccctccgaagtcgcttagattactgcggttagcgtgcatcacgagcggcagagtcaccagcacgtccaaaaccagtcgcgtcttcacgtagttccaggcgataaaccagtgcgagatgacgatcgcccctgttggagtcacatacccggtatgcagcgtgaacagcacgtccacagccaacaaaactccgactaccgcgtcaacgttcgtaagcgagtgctgctccggaaacgcgagctccgtggggaaccaaagtacgtaacaaagcgtggcaaagaggacaatcgcgtaccgcacttgagaaaatttcgagtagggggacagcggcaggaagagtttgtactgccagtagcgcagcgtcatccacatcgaccccatcacgtagtgggcagcgctgtaccgggaccctcgactcgcagtagttccataggcgagatcaaagtgttccccaagttgagcgctgctagtcccgctctcgaaaggtggaggatctactgcacccaccgagttgttcaggctgctacgctcagcatcaggagctctgtgaaagctagcagctcggtcaccgccgccctcatgagtcgagttagcaacgtcgtcacgatcgttgcgagctgagagatgagagtgcaaattgtgctcgggcaagttgcgcactattgacccccgagaccctcgagcggtgtgtctcgccgagttggcacccgctaggtcgctgttgccaccgtctggcagaccacgactcgacccaaccaggccacgactcgagccgaccgttcctcgtcgttcttctgccatgacagcggacggcgtgcgctgcaaatggcggatctggaagcgaaccatcatctcttcgtacggagtctcgggcgggtggtcggtcatggcgtcgcctgcagtgcttgcgagctccatggacgtggcaactttcgggttgaagcttgacgcgaaggacagccgcggcaccagcgagcccgtggacatccctagcatccgagtcgtcatgcttcggcgtagaggtttgtcgggaggtggagcaggagccccctccgagggccccgcgaccgggtaaacttcccccgtcatcgttgaatggcgccgcgaaatccgagctttggctctgcgcaatgggatcgatgcgtctcgatcggcgaagacgctggactgcgacgacaccgagtcggattgttcgactggcgcattaaaaacgaaggtctcgtgatcgctgacgcccccttcggggtcgggcccaaacaacggtggcgccaggtttgcagatgcatcgacggagggctcgtccatcgcgcaacacggtagtttcgctgtttcgagtggacggacgcctccgtttcgtgaacgcccactcagcatggacgcgctgggggagacgcacgatttgttggccacaactggtttaccataccacacgaagactttagctgcaatgcctccttcagcagtttacggggcttcaaaccgccacaagccttaatctcgatctcaccagagggatccgagcattcgtgacggagtctggcgttgatggcagggatcggttagctgagaagaagtagactgggtctagctgtgtgtacgttgtacttggcacaaaacttgatgttgggctggctgctgggggatcaaaccgcgacagtgaagacctgaggtgttattataccgtctgtatgaagccagcgttgacaacaccgcaaccctcgtactgttgtcggcgagtgctttggcatcatactcctggtgtcgtgtcaaggtaggggccgatgagactgcggtatgcattaagttcagatggcgccattcgttggtcttgctggtgcagtgcaccaggtgcacccattcgacccattcaaccgttgggtacactttcacagtagccggtctggtcttttccgcgcgctgattggctagtcgaatctgaatatccactttcgcgcccactgtctcgcgctaccgattgtatcccctagtccacatacaaacgcaaaacgaccatcactcctcgcctttacaaatctcaatatacgccttgaaccacggtcggttgcactagccacagtaaaaactcatatatcccggccgctagacgggccctccgcattccgcattctgcgtcgcgtcgtgggctcctcctcccctgcttgcttgcttgcttgagccatggcgtcgacgggcggcgtgcgcgtgaacatcgtggaggcgcgcggcatcctggcggccgacgccgggggcacgagcgacccgtatgtgaccatgacgctgctggactccaagggccaggcgctggccgcgggcggcagcttcaagacgaaggtggtcaagaagacgctggccccgcagtggaacgagacgttcatcgtcggggaccgcctggacctgcgcgtggccacgacgctgcggctgctgctgtccgactcggacggcgccttctacagcgacgacgtgctgggtgtcgtggacatccccgtggcgctgctgctgacgctgcgcgagccgctggacaactggttccagctcaccaagcacgacaagatgaagaaggactcgcagggcgagctgcacgtggtgctcgagaagctcgcgcccgtcgagtccaacctgggccgaggctcgggcgtgctcgtcacggggctggagcagaagccgccgcccgtcgcgagcagcgagccgcccaacctgctctacgtgacgttgaagtcaggcaaggatctgctgggcatggacaataacggcaccactagtgatcctattgtgttctttacctttaatggacagaagcacgagtccaccaagaaggagaagacgctgcgcccccagtggaacgagaagtttggcttcttcgcccccgatctgaagagcagcttgtccattttagtggaggactacgacattaccattaatgacttcatgggcaaggcggacgtgtcgctgaaagatctggagccgaatgcggagaagaacgtggcggtggagctgggcggcaagaggggaaagaaggataaagtcgagcgcggtactctgttactgacgctgctgtggacgtacgacccggaggctcgagacattgcggctaagaagaagaagtcgacatttttgcccaatttcggcgtgcccgataaggactacgactcggacgacgatgaaggagtggagattgatgatggagaagtcaagaagaaatctgaggaggaactgaagaaggagagggaggagaaagctgagaagcaggcagccatcttgtcggagctcagcagcttcgaaatcaaatccggcgactacaatgtccaggtgcacgtcattgaagcgcgcgacctggtaccgaaagactcgactggcacgtcggaccctgtggtgtatgttgaagtgtttggagagaagcagcagactgcggtgaagaagcaagtgctcagctgtttctgggatgacctgctcatcttcccattccgtaacctggacaaggctgaagtcgagatgggatacgtccgtctgagcgttatggatgccaacacactacagagggcagaactcatcggcggagctcagttcgatgtgtcgtacatttactcgcaggcgaaccaccagctggcaaacgtctggatcggtctgactgacattacgaacactacgaaccaaggcatccaaggatacctgcgagcctccatttcgattattggaccaggcgacaagcttgtccctcccccttcgccgtttggtgaaggagcaagtacggacatgaacaacgttatcatgccgcctagcgttactcagcaggttcacttcttgggggcaaccattcacgtagcggagcacttgccgcccatggatgttgccgtggtaggcagaggtggtctggatgcatacattaagggatccattgccggcggtgatgaaattcggacccgtgtgcgcaccaagaagggaagacgtgacgagctctgccctagcttcaacgaggagttgatgctcgttatccgggagccgtcaatggctgactcgatccagctagctgtctatgattgggatcaggtgggatcggacgagttggtgggctacgtctatcagagtttaaagctcgtcaaggccatgggtggtaaagtttcaccgttctgggccaacatttacggcgcccccttgcgtttgaagtcggttggcataggtgattcgatgaagaagcagatgaacacatacccagatatcgccagcacataccgtggacgtctcctcatcagcttccgcattttgaagaacgaggacaatgagtttgatgaaacgaaccagaagcgcaacaccaagcgcattcctcgcgacttgtacccccgcgagcgcatttaccgcatgcgagcccactttgtgtggggaagccaggtaccgtccttcttgagctctaagcgtcctggccagaaggcgaagatgcagttggtgatgtcgtgtggtctaaatgagatcgcttcgtctcgtgctcgtaatgtgaatggtgtggtggagtggaacaacatggaagagagcgaaaagatgcttcttcctgaagatctatctcaagtgcccgatattttcctgtatctttgcaggggagaaggagatacgcgcaaggccgtgtgcttccgccgttttactgcaaaagaacttctggaggatcgcggtgggttcaacacagaggtggaatggcttctaatgaaggaagaccaagcaattgatgccctggaggacgaaactttcccaggtaacgtgttggttcgcatgggcttcggaactgaagaaatggcgatgcagacagcctgggatcgctccgacctggatgctgtaaacaaacgcattccataccagctccgcgttcacatttaccagggccgtcgccttccacctgctgattcgaacggcttgttggatccgttccttgtcatccgatgcatgggagaaaaggagaaaatgacctcgaaaaaaagaaagacgagagatccattgtggtacgaaacgatttatttcgacgtgaatctaccggcgctcaagtacgcaccccaggtgatgctgcgtgtcatggatttcgatgactttgacaccaacgacttcgttggcttagctgcgctcaacctggcggaagcacacattcgaacatcggagcagctatcaagcggtcacctttcagcactgcctgacccgaagtggcatccgatcatgttccaggagccgggagattgcgagggcgaaattcttgcgtccttggagctgattcgcaagcagtttcccgacgaaaaggttccgcgtgcgattccgattttgccgagaaaccgcaaggcttttctggagatcacagtactcggtcttcggaacatggagccgtaccagttcctgccaattcagttgccttttatcgagtttgtgctcggcggcaaggatcacgcagcccaggagatgatcactgagaagtctaagcgaccatcgggaagcaacccaaacttcctgcaacgcatcgtgaaggaggtcgagctgcctgaaaatgcccatttcgcgcctcgactgaacattatcgtgaaggacacgcgtctcggtggattccagacacctatcatcggatcagcttccattgaaatgagctcaaagatcccgtggtcgaaacattaccgcccaccccagactgatacattcgccgaaatcgaactcgagtcagctgatgagtggaacgatgacgcaccccttctgggaagagtagctaagcctgacctgccatcggccgagtcggtcgataacggagcaggtgtgtttggcgcactgaagagcatgggtgtggacttcgaccctaatggaaactttgaggaaggatcgtctcgccgctcaactattgcaggtgaagatgacgaccccgattcgaagaaatacctcaagcaccgcgagttgcttgatggcgacttggaatccgagctgaaaacgacgcccttcgaaaagtacggattgcacattggtcagaagaagaaaaagtcgtctctcctcgcagcaatcaatccattcgcaaagaagtcgcgcggtgttggagatgacgttggaatctacaagatggctgggtatttcaagggtatgatccgtgttctcgaacgcgaagacgaaaaaccgctgctcgacttcgatacactgctccaaacacttccgtatgaagttcgtatatacgtcctggatggagttggcttcgcgccaatggatattggtttgaacggccgtcctggaaagtcagacccttacctgcgcttgaagctcggtgacaagaagatcagcgaccgcaaaaattacatcgaagatacaaccgacccggacttctacaagatgttcttgatcaacacgaagcttccgggtgccggcttgctgacgattgaggcaatggatcacgatctcatcggaggtgacgatctgatcggcaaaacaacgattgatctcgaggatcgactgtttgacaagcgctggcagtcgatgggcaaaatgtacgaaacttccagtcggctgcgtttgaagcctcttgaaacacgaaccctcaacatcccgacgtctcgagctcctatgggcacaatcaagctgtggattgacattctgagccctgctcaagcccacgactacccgccaatcgacatctcgctgccttctccggtcgatatggaacttcgtgttgtggtctggaaggcgcgcaacgtgccttcgttcgacacaatggaagacatgaacgatttgttcttccgctgctggatggaaggttcggattaccaagaaacggatatccattggcgtgcgaagaagggcaagggatcgttcaattggcgcatgaagttccctatcaccttggggcacaagcaaatcaacaccaaaatgccgtattttcacgtccagggctgggacaaggacgttctgtccgcgaacgacgcaattggtgtggccacggtggatcttggagccttcttccgtcaagcgtacaagctcaagacgaatgtccagtgctacgaagatgacgatgaaactcgaaaaaagaaaaagaaggccacttctgatgatgatgctgcggtgaagaagatcagagaggctaccggcctctgggatgacgacgatccggccgattcgaagtggctgcagttgctaaggcatgaccacaagaccaacgagaaggagcgcatgggcgaggtgtgcatctcgctggagttggttcctgccgagaatgcgaagaagaatccggtgggcatgggtcggtcgtcgccgaacaattcgccgtacctgcctccccctgctgggcgcctttcgttctcgctcaacccgttcaaggtgctcaacgacttgctcggccctgccatctgccaccggctcacgtgctgcttctgctgcatcctgttcatggtggtcatctacttcctggcaccgttcatcaacgtggcgattatcacgctgaagggataactggagcaaccgaggaccggtttgttgtctttgcgctgcttgcttgcatatttctaatgatgtagcgccccgcgtagtacttggaacttgaatacctaaattttttgtgcaccttgttgtcttcatctcagccattctatttaggtctcgaagtgaagcgttgcgatcgtctagcagcgataactgccacggtcgcttcgttactcggtgtcgaagagtaattcttctccgagacctcttcttcttcttcttctctcatgccccgcaatcgtgtcgggatcgaggttgactcgttgccaccagcgcataagcaggaagatgagcctcacatcgacagctcccgcgatttgttgggtggatccttctcctcgacgcagctgaagtcgactgcttcagcgccatcactcgaagctgccaaggcgcaacggcaaaaggaactgctgcggaagaagaaaaccgagcgacgtgctcatgcacagcagcgggctgctgagaaacagcagcgccaggatgagaagaagcaggaacgcgaaatgctgtcgatgatggacgaagatttccccgcggtggacccacccaacgtgctggtcgatacttccacttcgacccaatctttggcgtgtttggaggttgaacgcaaggatgaggaagctgcagctatgaatcacgatgcggtcacctttgtgtctgagaaagaccccgtaaactcgagttccccgcgagctgctaaagacgacgctcctttgcccccgttgagttacggctacgatattctagctgatgcttgcccgcccactacaactgagactatgccaaaagtcacaaaaggttctccgctagccaagaacgcaaacgctgcggctgctacaatccagaaagctctgaaaaagaaattcaagaagtgcaagacgatgtttcgacaatctcctcgggtcttcgcggaagaagtggttgttgctccatcgtcgccagaagaaacagcgactgaagtcccggcgacttgtgacgacggagccttagagacggagcttgttgggcctactgtcgaggctttgggcgttgatattgtacgaattcctgattctccccatgaaaaaactccttcatctccaagacccgagcccattgtgcctcttttgacattaccactgaaagcaccaggaactccgccaccacgtcctcccagcccaagttgttctgaatcgtcctcctgtttttcttcatcctgttcgtgttcttcacagtctggttccgcgtcttcgtgctcttcttgctcgtgttcatcgagctcaacttcaagtccaagctcatcagcgtctgaatcagacaaaaggagccgaagctctcaacgcgcaagacatacgagtcgaacagctcgatcttcacaaagacaacgacgtaaaaggcggcgccacacagggcagtcgtcccgcagccattctcacattagtagggggccatcgtccacgctattgccgccacgcagcgaaggtgatcggcattatggcgagcttcaccagtttatggcgacaagaatccaagctcgaatccgtggtgttcgtgggcgcgctgaggcacatcagcgacaaatagaactggatgaagagctgaaggaggaagctcttcacgagctgcaacaggaggccgttgtcaagattcagacaagagctcgtggtgtactggtacggaagaagatgccaatctcagactcggagagacgacgaagacggcggaggcgatcccagctccgcaacagcaactctcctccgagttcacctgaacgtgtggcgatgggggtttatgatgacccagacgaggttggggagtggccggaagagattgacttggagcttctggatgactggcaagagctaaatcaaccatccggaacgcccgaggacaccgtgacgtacactgagtttctctcgcgaggcagacttcgagtattttgtggcacctggaatatgcacgcgaagaaacccactgacgacttacgcctctggattcggctcaacaagtaccacattatcgccgtgggcagcgaagagtgcgtgaactccatcgcaaagagcgtcgttttcacgtcgaaaaagtcgtgggaggaccagttaagaagcactttgggcgatgactatatcctcgtggcatcgcacgcgcttactgccattcacaacatcgtcttcgtgcactccagcctcttgccactgctcggcaacattcaatcggacgccgtagccactggtctcgggaaccagttgggcaacaagggaggcgtgggcatcagcttcacagtgggggtgaccagcttcgccttcatcaacagccatttcgaagcgcaccaacgcaacgtggccaagcggaacggcaacttccaccggatcaaccacgagctcaagctctcaccaactggagcgctggcttcccctacgagctcgacagcggtggctcctacaccgggcaaaccaggcttgaacgggctcggtcgaacctctgccaaccggttctcaataccaaccgttggtgcaggacccgggggtaagcgcaccgtcagcgagcgcttcgaccgcgtgttctggtacggagacctcaactaccgcatcaacggcacgagacgcatggtagacacgttgctgctgcgcaaccagcacgaagttctgctggctaacgaccagctgcagcgcgagatgaaggcgggcaacgtgttcgcgcacttccgcgagggccagctgcacttccgccccacgtacaagttcgacaagcgtagcgacacgtacgactcgtccgccaagcagcgcatcccgtcctggaccgaccgcgtgctgttcctgtccaacgacaagctgcacgacgtggagctgctgagctaccgcagccagacggacttccgcacgtccgaccaccgccccgtgtgcgccgtcttccaggccaacttccggccaacggagactgagtccgcaatgtccccgcggccaagcagcagcgcccatgaccaggagaaccacgccaccagccaggcatgctcaatacagtgacgaaccctatcaaaataaaatatcccttgttctggaagcttgcgtggttgttttggcaactgaaaacaagcaagttgccttttgaacatcattcttgttgaagtggtcgcgaccatctggaggcaactatctaacggaccatcacaaacccacattcgttcaacgatggcttaaaaattaactttgattttgtattttgctatactggtcggatagccttgctatatcgactaagttcgaccgtcttaagtacgttggtttcggcccggcgccctcacacaatatattccgcagtcagcagcgcagaccgaccccaagcagcggcaaggcagcgagctccggacatggcgcagtacggcaaggcgagctactgggacgagcgctacaccaagtacgtctccttcctctctctctcctccctccacccacgccactggcgcctccgtccgcgcccgatcttgcaagatacggccatttttgtcaccgtgcgttgcctcacgttttcgacactttgttttggcctattttcgacactttttttcgacagagactcggagcagttcgactggtaccagcgctacggcgggctcaaggagctgctgaaccagtatgtcaagaagacggacgccatcctcatggcgggcgccggcaactcgcgcctgtcggaggagatggtgaacgacggctaccagaagctcatgaacgtggacgtgtccgagatcgtggtcaagcagatggccgccaagtacgaggaccgcgtggagcagctgcagtggcagaagatgaacatgtgctcgctcgacttcgccgacgagacgtacgacgccgtggtggacaagggcacgatggactcggtgctctgcggcgagggctcgaccgccaacgtggccaagatgtgccaggagatccaccgcgtgctcaagccgaacggcgtctacttcatcgtgtcgtacggcgtgcccgacaaccggctcagctacctcgagaacaaggagctgcagtggaaggtcacggtgcacacggtgcctaagcccacggtgagcgccgtgcaggtctcggaggccgacgccaacgccgcgcactacatctacgtgtgccagaagggcgtcaagacggagtaacgttaagggtgcggcggacggttgggttggttggagcaaggctttccataatatatcgacactctcacgagcgacagcgagagacgagttttcctaattggtgttgggttgtgtgatgcgttgtacgaagtgcagttgctgacagcaacttgctgttatgcgcaggacgccgatccttctccttgttggtgctcgcaggatgtgtgaacgcatttcaaaggtcagacgacggttgactttcgccgacgtcgcagatttgggttttggtacacgggtctcagttcgaaagaacacgccgttctgcgtaatgctggcgctgactacgccgagctggaagaactcgtctccagctatctcagaccatccatcgctcaagaacttgacccttagttgggcttgcagcgacctttctatcgagctattggactggatctgggacctgagttgcgtctccgtcgcagcagggtgggcacgtggaccttgaccaatttgctgcagttgaagcccttctactatcggtggcaatgtgagaaatcgctctatgaagccgctagccgaggacacatacaggtggtggagtggctgttctcccacttctcggtctgcacagcgcgtcaatctgtcgttgaagccgctgcagccaaaggacatctatatgtgttggagttcctgggaaagcagagattacctaacaggtgtccttcaagagacgcagggtggtggaagaagccgaaggcgactcgaaatatggttatgagaagaagacgcccaatatggggttttggagcgataaagtggtgaagttggtgatatcaaacggatacgatgatgttgccgtgtggctatatgaccgtgaatcgtactacttgtatatctctggctaccgtggcagtcctggcagcgaacaaatcacaagctcaatcgaagtcgctctaagattgaactcaccaaaaggttcgtgccgaggggacacgaaatttcagattttgttacggacttcacacgagaagaagtgctcaggcgttgtgggtatgacccatcggaaggcgttgaacacctggttgctggacgagttggctcgcacgagtcgcttggatctcgcggctcggatcataggcctgcacgatggtcctcgagattcacgtgacgagtgggcagctgaatgggtagacatggcgaaacaggcctgcacgtgcggtgatatgccgccgcttgtcatgtggatggtggacttccagacagagcatggatcgtatagtgccctctacaatcgagatggggactggagctcatggaccaactcttaacgatttctagcgaagatgagaacattgctgtgatgcaatacctttttgatcacgggagggtccagaactacaagggcgcgttgctgaatgcagtgcgcaaggcagcggggagtctgttaagttgcagtcgaattcgtccttgcgactaacttccatcgtactctgtacttaagtactgatcgaagcggcatggaacgggcaattgggcatgctgaaatttattcacaacgcaggtttgtcgacgacgtcatggctacgtccaccagaaaagccgatcaaaatacggggcgaaaaggtattgagagagccagctgaggagaagtacaaagatcggcttactgtggatttgtccctcatggagtgttatggatcaggctgcagaaatcggcaacctaacatttttggagtggctggatacaaatcgcctagaaggcagttcaaaagacgcgatggacagagcagccctcaacggccacttggaagtggtgtcacggcttcatcatcaccgacgagaagggtgcaccgaagaggccatgaatggggctccgatgaatggacatctggacgtggtgaagtggcttcacgttaatggtacagaaggatgcacctcagacgcgatggatctggccgcagctcgaggacatcttgaaatggttgagtggcttcacaccaacagaaacgagggctgttcgacggatgcgatggatctcgccgctgtggtcatctttgtcgtaggttgagcgcatagggctcacaagaaacagaacctcaaatacacaccaactcggtctctaagtttggtctgccgtgggagacaccaaactgaagtcagcactggtcgtgtgtaagacggtgctctccaagcacttatccgtttaaatttacagtgccgtaagatgaaaaaaataccgaccaaaggcaaggaggagcaggacgtgctttcttaggaagaaagcctgatcgtggtagaaaatagtcgccaagaggtgtgttaagtgcaagtccaactgggcattattcaattagccgagcttcaccattacccaccccggaagaaccccaacaatggatgtgacaggccactgtcacacaggcgccaccgcgtgtgcgcggtggccaatcagagcctactataggtttaatggctgggacggtctcgagtgccgagaccgtctcggcacttaattccagagttcaatttgcctactacttcctctgcttgtgtaagcacgtaacgggctgcagttaccccgttacacctggtagcacttcgctaatccgtccaacgcccaagatcgtgatgaacatgaacgacacgtcgatgcctgacgcgcccccgacgactgccacttcactggagcacgccagctttcctcacctgtcggcgaccgagtgggtggcgctacaccgcctcgcagtggtgtctggtgacgctgtgatcaagacactgctgacggcgggaaccgaggagcaacaacgcctggccgcccagcgcgtgaactcgctgacctccgtcagcgagtgtcgactcccacgcagaccaagaacaagtccgacatcgtgaagctcgatgcctccacgtacagcggtgaaggcgagggccgccttcacttgaaccgctggttctgcgaggtggacatcgcgatcgaagctcggcagccgtctaccgagctcgcgcgcacgcgctttctcctgtccaagctggcggggaaggcgaaggagtgggcgctcggcaagctcgtggccgacgcttcctgcttcccgaccatggcatcgatgaaggcggacttgcgactcgcgttcgagccgccccaagatgaaagcgttcagcgctccgccttcctggcgttgaagcaaggacgcatgtccatgcttgagtacatccagcgcgcacgacaccttgtgtcgtgcatcacgacgcatcccgtagacatggcgacccaagtccacgtcttcatctccggcatgagcgctggctaccagcgcttctacctgacccggaagaccccaccgacactcgaagaggccttcgctgttgcgctccgtgaagactacagtgtgacggcgtcgcaggcttttgatgtctctcgggctccagtgcccgatccggagccgatggaggtggatgcgatttaacggttcggtggacgtcgggtgccgacgtcatcagcaaggccgccaacggtctcgtcaacgcgcagtccccgcccgatgcgctgctaccgctgtgggaaacctggacatcgcgcggctatttgccgcgctccggcgccgatgcaggcgaacgtcacggccgcgaacgatgtcgccgctccaaaaaacggcgacaaccagtaggtgcggggctccctactggacgtggaaggagcgatggttctctggtggcagaacctcctcctagccctcccgtgcttcatgcacaactctttgccaccacctccggcagtggcacgaggctgattgtgctccgcctccacgtggacggcgcgacgcgccctcttcgcgcgctgctggactcgggcgacacgaacaacttcgttcgcgccgagagcttgtcggtgttaccggcggacatgaacattcgcgacaggccgggcgacatgatcgtgaagtacgctgatgggaagccgcggcggacgccggcgctcgacgacctttgcgtacgagttcgacgggttccgcagttccgaggagttcttggtgatcgagctgagcgggtcgttcgactgtgtcttcggcatcccgtggctcgcccgccaccagcctgagatcaactggctgactggcacagtccgccctcgagacattgatgtgaatgcagtattggcgttcctgtgcggaacgcctaaccagtggccgcatgttgccgtcatggaccctgactccatgacccatgctgcgcacaaagcgagcgatggcccttcgtgtgcggtgtgcgaactcgcaacccgcgccggtcctgagcaggagcctcaggacgtgtctgacgtggtcgagcatggattcccacgtccctatgagcagcggttctcggaagcagacaatgacgtggtcgagccacgtcaggactagcagcggctctccaacgttgaagagcgagaagatgtggttgagcgtggcctcccacacgcggtcgagcatgggttcccgcgagtggtcgagcgggagcttcctgaagaagaagatgtggttgagcgtggtctcccacgcgcggtcgagcatgggttcccgcgtgtggtcgagcgggagctccctgatgaagtcgacgcggtcgtgtccaatgacctgcgtccaggcgccgacgttgtgtcccggcgccccagttcagcggccgggatcgagcatgggctctcatcggcagcttcgaacgacactccacgtccggttcgatgtcgcggacgtcgcaatccgcgccgtcctcgtacgccatcggcggactcggttgaggatgaggctgaagtgatctcagtcctggtgggggacgacgcggaggcggctccgcgtgtacgcgacgtcgaagtcgcacgtccaccgtgcaacgccgccgagatcactcggttgcctgggctctcgtggaaacactttctccgtgacctgaagaagggcgagatcgagcaggtgtgcatgatcgtcgccgaagacgccgagtcaattacggccgtcgcaaccagtgcgacggacccagcttccgacgccaggacgcgcccaaaaggagccgagccgaagaacgcccgtcaagcccgctacgcagctcagtcgttgccggcgctcgaagcggccggcaacccagtcgctccgctcgtgcgcgaattcatggagattttcccggacaaggttccagccgttcttccacccgaccgcggtgttcggcacgagattgacctcgtgcccggtgcgaagtactgcgtgacgcggcagtggccgcttcctcgcgaccaagtcgaagctattgacgccttcttcgagagtcgccggcaagccggccacgatcgcgagagtctctcgccgcactccagtccgacgttctgcgtgaagaaagcaaccggcgactggagaatcgcccacgccttcaacaagctcaacgaggccaccataccggcgcaaacgccgttcccgaggaaggacatggtgttggacaccatgtctggcagcacgaagtacagtgccattgatctgatggatagcttctatcagatcttgatgcacgaagacgatgtgccgctgacagcggtcagcacgcccagcgggatgttgtgggaatggctcgtgatgccgcaggggctcaagaacgcccccgccaccttcaaccggatggtgtacaacttgcttcggccgtaccgagacttcgcgcccagctacttcgacgacatcttcattcacaatcgtgccgaggacggcatgacggacgttgaggtccacctacaacacctgcgcaaggtgttcgaggtgatgaagaagaacaagctgaacaccaacttgaagaagtgcatcttctgcgctcccgagatccctgtactcgggagctacgtcagcaaggacggtgtccgcgccgaccccgagaagatcgaggccatctgcgcgtggccgacgccgcaggaccagaagcagctccggcagtggctggggctcgccccgtatcttcaccattactcgaagaacttcgcttcgacgatccgcccgctatctcaactactcaaggcagacgccacgtggtcgtggcgtcccgagcaccaagctgccttcgacgcggtgaagtcgagcttgtccaccgcgcccgtgctcatgcttccagaccactcgaagcccatccatgtcgtgcgcgacgcgagcgatttcgcgatcggatgcgccttgatgcagttcgatgacgaaggacgcgagcgggtcgtcagctaccagtcgcgtcagctgaagccggcggaacggaattttccggtccatgataaggagctgctggccatgcgctacgccctcatcaagttccgcgtgtatctccccggcgagcagaccttcgcgatctacaccgatcacgcgtcgttgaggacagcgacgaggagcccccacttgtcccagcgtatgacgcgctggttgtccctgttctccgagtacaacttcgtcgtgcactacaagccgggcaagaccaacatccttgccgacgcgttatcgcgtcggcctgactacgtgcagtcaggtcgccacgcagttggtgacgaggacgacgacgagtgcgccgtatgcactgccgaagacgtcgctgctattgaggttgcagcgaccggtccgctccgtgacttgatcgtggacgcgtacaaggagctgcttggagctgatccagttcctgcgagaccctggtaccgtggcgaagcgcaagctgtctccacgcagccgctcccgcgccgaccgctactcgctggacggcgagttgctcacgtaccgcgtcgaccgcgaagacccccgcgcatcgtcgttcctctgggcgacgatctccgagctcggctgatccacgagttccatgccacgccgagcggcggccaccttggacgcgagaagacgttcgcgtcgctgtccagagacttctactggccgcatatgtacatgtgggtccggaaatgggtacgctcctgcgaagcgtgccaacgcgtgaagccgaatccgtccaagcaggctccgcttcgacctctcccagtcgccacagacgcatgggcgtctgtcagcatggacttcgtcttcgggctgccccgagacactcaagggcgcactggcgtgcttggcttcgttgatcggctcagcaagatgcttcatcttgctcctgttgctgccagcatcacggcgaagcaaaccgccgcgatcttcgtggacgtggtgtaccgccaccacgggcttccgtcctccatcgtatcggatcgcgaccctcgctttacgtctgctttctggcgagagcttttccagttgctggggacgcggttgtgcatgtccaccgcgtcgcatccggagacagacggccaaactgagcgcgccaaccgtgatgttgaagacatactacgcagcttcgctacgtcgttcaagtcgtggtgcaccttcctgcccctggtcgaattcgccctcaacaacgctgtccacgcatcgaccgggctgtccccgttcttcgtcaacttcggtcgccatcctcgcgttccagcgctcgttggtgtggagcgctctgaggctccggctggtcgcgctgctgaagacgcgggcgatcccgcgtcactcgttccggatgaagacgttgctgtagaccccgacccaggccaagctgatcgtcgtggccccgtccccgacgctgtctccgcgttgttacatggcgtcaccactcgtcgaggctctaacgctccagcagtcggagtgcgcacacgtgccgccacgcgggcggcacacgagagaccacacgctaaccccgaacgagcttcgcgcacacgttccgctaggagggcggcaccttcggacatcgcagcttggacttcgcgcacgctgattgacccgatgccacgtcgggccgtcgagtatcaagacgcgcaagaggcggcgacacctgccgcgccagttcctgccaacttcgatccgctcccagcgccgcagccccaagacactgcggctgtccgcgacttcctgcagaaacgtgagtcggttgtgcgttatgtacgcgacaccatcgcggcggcggtggaccggcaaaaggaatatgctgatcgacgagggcgacgacatctggagacgttcgccgtgggcgatcgggtgctgctctctacgacgggcatgtcgccaagtttggtgacgcgaacaagctcgcgccccgatttattggaccttttaaagtgacgaaggtactcggcgacgcctacacgctgcagctccctacggcactccggctgcaccctacgttctaggttggccgactgcgacgataccatcccgctgccattcccggcggcgccgatgaccatgcccaagtcgatcatgacgctgcgccatcgcagcgtcagcccgaggttcgcgcatctgcattccagcgcgacggtcctgctaccctagtggacgctgctgggaaccagcgtcacattgttgaagccattctcaaccacgacgaccaccgagatgcaccgcagcgcgcacgcacggatcgcggcactcgtcgccgcgatggagagataccttcgcaccgccggtatctggttcgatggcttggcccgatggacgacagctgggagccaagcgaggtcctactcgcagatgcccccgactgcgtggcggcgtacgagacgtcgcttgcagagggcgcggcggcgagccgtgcctaactcaatgagtgcctcgcaagagcagacagcccagcggcgatgcctgacttcagacgacggacgaccttcggtgttccaggattcgcggcgacctgacccacggtggagtcatggtgcgtaccaccgcgacgaactcgcttcatgccacgccagcgccggaccagctgcaccaagatcgctccgttgaagcccacgctgctgctgcggtcgcgcaacagccagcccttgataacgtccgagacactgctgcgctgcttcactcacttcgcgcgcgctgtcggcccgcgcctgccaagtagcgtcacgtccgcctcgcgaagctctgcagttcctttctagagtttagatatgtgtatgtttcaatcttgagtagggggtggtgtgacaggccactgtcacacaggcgccaccgcgtgtgcgcggtggccaatcagagcccactataggtttaatggctgggacggtctcgagtgccgagaccgtctcggcacttaataccagagttcaatttgcctactacttcctctgcttgtgtaagcacgtaacgggctgcagttagcccgttacaatggattcacccacctacacacaggttgaaagcatgaccccactggagactactgtcgccctcgcggatcaaggccaagattctggcgacgactcatctcttctccttcctcggcgcctcttacgcaagacactgagagcaggaccccccttccccgattgagaagcatttcgcaaggaggtcggcagcgctcgaagcgattaattactgacgtggtatttcccctttctgaggcgaatggcgcgatgaactacgcaccgcaggaagatttggtggcacgcttccagattcgccagatccaccggacagcgttgcacaccccacctctttcagatcgcgtctcaaaccacaaaagatcatcggtcagctcgagcccgcggccaacacaggacgtcaacacaggcggtggtttcgaccaaactgattccagaaaccaatcaaagttgacttcactacgatattttacctcggtgaacgccaccagcagctcatggattgagcaggtagaaactgcatcttgggcaatctacaccagtctcgccacaccaatctcgccatattcggcgttctctcaggtgcgctacttggtgactttattagtcgcagctacctacgtgttgttcttcccacttgaattcgcattcccgagccagcatttcgactacgtgaatggcatcgtcgggtttctgctgggtctagacgcactggcttcgctccacatcagctacgtgaggaaagacggctccattgcaaagtcacatcaagatatcgccctccactacctgaaaactcgcttcgtccccgacgctttacttgtgatcccgcttcttgtgcatgtgcacctcggcgaaattattgaagactggatgcatttcttactcgatctcctgagtgcagaacgcctcgtatacatcatccggtttgtgcagaagacttcgtccgagcatcttcaccaacctgggggtggctacgatctgtgggcctggctgttctactcgaggtactcgcatcttctccgcattgctgcaacggtgactatggttgtctgcatcgctcactacacggcgtgtatgtggacggccccgttagaggaggctgacgagtacgacgaagctaccggttcgtggcggaaacagtgttctgcaagtttttacactgccttactgttgctccaaggtgatgcaatcggtacgaacactgcagctcaaaacctctttgcgtccttgttagtgttcatcggctcgctcgtgttcgccatcatgttcggccacgtcgcgatcctggtaactcgtctgcgtaccaacgcaaaatggaggaggtttacgccatgaccgccaagctgcagctgcctctcccgctgcgagagcgtattcacgagtactacgagcatctgtggcacgagtacgcgtgtattgagagatcgtccagttttccaagaagctctcgcacacccttggtcttgaagtcgtgctactgaagtatatggaagtcgtgatgcatattcctttctggagggactgcaccccaagcttccagaagcagctgatgcagtgcctcgacgtacgcgtttacctgcccaatgatattattatgcgccaaggggacgtggatgttgagttctacatgataaatcgtggctactgtgaacttacatcgggtagcgatcaattcgaaagggttacaacctcgataataccgccgatggctactagtaaagctagcactactagcattcggagtcggcggagatcctcagtgttaccgttattacccatagcggttgttaatgacggacacctccagtccgcgtatgagcttgatcctgttcaacggcagtactatagcaccaccgaacgcccaactgcagaaggaggatacgaggttttgatatcaagaggccaagccttcggggatctggctctgctaacaaattatcagcgcgaggccactgtacgagcgtgactcacgtcgagatgtgtattctctcctgggatagcttccaggcggtactgacacgataccctgcggatcgacgacgagtagttgtcagtatgctcacctcgtacattgagggccacgagtcccggcaactgccctgtcagcttggatagtggacacgcaggcatatccgagtcctctccacgattcgattctttcggttgtgcactgaagacctcgtcaaccgagcgcgtcggcggcttgagaactagcatcggggcaaaaaatatcctgtgcattaggtgcatttgggtcactctgcccgacagttttcaagcaacttcaggatcgcctacagttcagactccttggaggattccagtcgattaccagatttgaagagctcttcaaggcccatcaaagcctgaaaaggcaaatagctgacgcctccctgttaacccagcatctccaacattcagaacgcaggccagtggttggccacatgcgccgcggacgcaatggtcaaaacgagtagcaactccccccccccttctgcgcgcgcgcgcacacacacacacacgtttccggatatcgaaagagctctatctagaaggttgatcagttgcgcaatgcctcgttcctcgcgctcttaaaaccccagaacttgatctccgcccaggggttacaaaaccaattgcggtccacgggaggtgcaggaatagtgtcttccatccagcgcgcgtcccagcccgttgggtagttgcgtcagatcaccgataccgttgggtgtgcgagccggcaaaaaataaacttggccgctctccacactagcaaagttcgtcttgcccacaaccgaatcagtactgaattgaacacgaatttccgccccaccacgttcctctctcatggccgacgaaacatccacagacgtcgaagtcatgacgccagacctctctaaagaagaattctcgacagcgtcaacctcgtggcaaaatgaaccggacgtactgctggcgcgcttcaagagcaatgtgagaatcgcgcgacgacactccacccaactggccccaggcgtcgtgtatcccatcccggaaggtactggagaagctgcccccaatggaacaatcggccaagcaaggcgactgttacggcgcagctcaaccctccgcggtttaacccccacgtccaagccatgggctccgatgctcgctgggatcagtcgcgctggagcaagcttgaaggcttataatgacaacacggaggacgccaaagaagccatctgtgagaccccatacgaggaaatgatgatgcgcttccagatccgccagatccaacgcaccgcgtcggggacagtggtgcgtgcggatgacaggcgaggttcagcaggctcgagccgctccccagagaccgacactgccggccgtatcaatagcccagagaacacccatgataaccccatggaccagccaaatcacgaggaagtaccagatcagctgcgggcccagccacggctctcctcgctacagacgagtgagcgcctcagctccagctacgatgcgcctgtcgtggacggtgcgagccacgcgagcacggtccctcctttaggcggaagattcgcctcgtttccatcaagacaggtcaattttgccgctgctcgagcgattgaacagcctgatccgtggcgtgacctacgcgagtctattatcgacctgctccgtgtctggattgacatggtattgacgccatttacaccgttctccgggttttcccaagtgcgatacctgatggttctgctggttacaacgacttatgtggtgtttttccccttgggcttcgccttccccgacgtggagcaattcacgtacgtcgatggtgcagtgggcgtactgctagttcttgacgtgttgctcagtcttcacaccagcttcatgcagcctgacggaaccattgtgacctcgcaccgggagatcgctcgtcactatctgaaaacccgcttcgtagtcgacgctctgcttacgatcccgctggtcgcgcatgtggacaacaaagccgggagaaaattcggcggcacgtggcttcacttattcctcgacatcttgagtgctgagcggcttgccttctttgccagattcgtccgcatgatctggctgatgcggctgaatcaatccggaagcggcaacagcttctgggcctggctgctctactcgcggtactcgcatctgctccgcattgctggcattgtcacgatgctggtgggcattgcgcactacatcgcctgcgtgtggaacgtcttgctcgaaaaaggcggcgacttgagtgacgagtctgcttcctggcaggagcagtactccgcgagcttctactccgcgctgttgttgctacaaggcgaggccgtgccgactgatactgctggtcaaaatctgttcgcgtcgctctctgtccttgtgggttccatcgtacttgctgtcatcttcggtcacgtcgccatcctcgtgtcgaatttcaacgcgaatttcacgaactaccaacgcaagatggaggctgttttcgccatgaccgctaaactccaactgcctccttcactacgagagcgtatccacgagtactacgagcacttgtggcacgaatacgagtgtttagacggtgagattgtccaattctccaaggaattatcccacacgctcggactggaggtcgtgctcttcaagtacatggagctggtcatgcacgtccccttctggaaggactgcacgcccgatttccagaagcagttgatactgcggctcgatgtacgcgtctatctccccaacgacttcattatgcgggaaggcgaggtggatgacgagttttacatggtgaaccgcggctactgcgagctcagtcgcgctctgcatcgctttgagcggatctccaacaccatgattggtatgaggaggacgagcagcactcctgggtttaataccagtcgaagccaaggaggactgaccgggcggagcaacggtggcatgacaggccgtcgtcggtactcagggctgactggagtgagtctcaacgacggccatcgacagtcggcgtacgagctggacccagctcagcgtcggtactacagcagcactggccgtcgaaccgccagagcgtacgagatcatgataacaagaggccaagcgttcggagacctggcgctgttgatgaactaccagcgagcagccaatgtgcgcgccatcacccacgtcgagatgtgcgtgctcagtcgcgacaacttccaggcagtcctcaccaagtacccggacgaccgacggcgcgtggttgtggacatgctcacgtcgtacatgcagagctacgagatgacacactcgcgctgtccactgcttgagcttgtgcgtaaagtttacagcgccgaggcgatcgctgaggcgtgtgcgaaagctggatcggctccaccgttgcttcctccggtgttaacagctcgccaagccgccgagcgagtttacacagccatcaacttggagacgaacgatgcgacgctgaagtttggcatcggcgcgaacatccgcgagcagctcatcgatttgcgcgagcgcaggcgacagaagcgtcaaactcagcgacacccgcgctccattttgggtcagagtgctcgaaaccttgtacagaaaactgggggtgacgtgagggaccgacggactagtgaacacactagcgatatcacggaacgagactcggtcacggcgacaattgatccacctccgcaagaaccagcaccagtactgcagacaccacaagctcagtcgggtttatcctggcaggaacggttgcaacagattgaagagcgcgaggtggtgattctacgagcgctgcaggaccttcagacgagtttcacgctgcttcaggcacgacaagcgacgcaatctgctcctgcgcctagagctgcaactcgacctcctcttggcggcccatcgccaagctcagagcttggatcagcgcagaacttgcccagtcggaagcgatctctaccggaaaaagagatcccaacaccagaatctgctgcggttactcgcccaaggctgcttcagcgcatggggtcattggtacgccgttcttctgcgaatgtagtggatacccaacctcagcagcaagaagtgaagccatcacccacgtgctacgcagaccagctctttaaatcccacaccaaagccgcgtcgttccgcgtgccacccgctcacagacgactgcgcactcgtcctatccccaaaatggcgcgagcctccacgttttctatgcgttctgaaaaatcaccccgcgtcgacacgaccgacaattccacagcgacaatcttcaatccactggaatctcccagcacaacgcctgcctcagcgcgtggagaatacccaccgaagaagaggagcttccgccgcacgcacagccaaacgctgcaggctctagtcgaaggaaaagtcgtctcccagccaaattccagcgtcgcatcggggtcaaacccagccactcggctctttcgacgcgtgagcccagccgtggcagagacccgagaatcccccacacgctacgccgacgcactctttcgcccgcggactattgccttcgacaaactctcgactgatgcagacagctcgacgtagttattgggcgagagtattcttacaaggcctaaaatccacagaagttgcgctagctgcagcttttgcattcgttttttttcagtgacgcctcgctttcttgttctccagaatatgcacgacgtcgaagtacccagctgccctagctctcgctactgcctcgtcgacgctcacttggtcacactggtctcgcagcaactccaccacctccacacggccttccattgctgctgccgagagagcaaacttgacagccaagacgtcacatttctccatcaaaacttccacgacctcgccatgaccacgcggagcagcgcaagtcagcgcacgcgtgatagtgtacccgtccatttggctcagcaagcgctctacaaggacgacaacaccatccgccgcagcgcctgcaaagacattcgcgatcgtgatgtggtcgcaactgccgagcaccaactccgcgatgtccgtcatagcacaagccgcgatctgcggcaacgcccgttggtatgtggcctggtcgctgtgcgcaaggataacttgggcgacctcccggcatttctccttcgccgccttgaccaaagcttgcactcgggtgtcgacgctgctactcttcacaaacactcgcgccatttccgcgctcttcttctccacggcaacgtccagaccccagctcacatcagcgtccccacatttgtcaactagaagctccagcatgtcgaccgcgccgtcggacgccgcttgttgcaagttccacgatgtcactcttcagaccctctcccctggcctgcgtcgcctggcataactccagtgccagctccgccacagccagctgattgtcgacgaccgccgggtgcagcaggctgcctatgggcatatccacccggtccaatagcagcttaagcatcacacaccaaagtcgcaacaagtagctcgatgtgggcgagattccactacaccactgattttcaattgctctgcagctggtacctggtaccacccgctgcccttcgtagtgagcatttggtatggcgtcgcacgccaacaccttcaccacttagcaaaaccactgctaggccgaacacgatccactgcaccacagctccaagcacttactgctcgcctcgacctggggccttcagaccaccatcgtatactatctcagcccaggcgaccggtgccgcgcgccatcacaatcgtctaccggccgatcttggctggatctgaccatggaccatgacgctctttgatgtggccccacctgtccacgtatctccatcatttgcgtggtctgtccttaaagcgtttaccttcgccgtagtcatcgctaacacggccacatctgcacgtcatctcgtcttcattttgcttgggaacttggccccgttcgctgctgcagcaccacgatctcctcgacgggctcttccagccgcgcccttcatctcgattaacgggtccgcagtctacaccagcgacaattcatgtgagatctggtaaggagatgtgcagtctcaatcgtagtgaccacgtagtctcgaacgtagtggccattgccacagtctcagtggtgctcagtggtttttgcagttcagtatagaccatatgaggccggcacctccgctgtgtcactcgggtagttctccattaggtacaggtcttcattttgtctgcttcatctcttctttcagacttgataacatgccgcaacgccttgagagtgaatgaatctctgaacgatgcatgctcatcgatacagtttactctgttcgtgagccgtgaacggagctgttcggcggcgagatgctcatctacggcccccaccggaccgcagctcttcgtcaccacttgcaacaaccttgagaggactctgtatctgttgcatctggctccaccggctccgcacgtcttcaccgccataacgcgagtccgagttcgaccgcactagtccgcgactcacaagtctttcatttgtctctcagctatgatgcgaagcttcactcgactcaaattgttcattcatgcacgtttattgcgcgatccagttcgccgcatgtagcatgaatgcgactattagcatccacagccacgatgcagctactttctgcgaccgtgcatcaacctccacttcgttccgctccacaatctcctcctgcccaagcggccacaaagttgacagcagtccagctccaccgcttgctaatctggctgcatcacttccgcaccatgcatgcttggcacaccatgctaatcagcaacatcaattttcaggctcgagctgtctacatcttccgtcatacggattgcacatcttcggcttctcggcgacgctcctaactggtacggcttgagtcacagccaccttggtagttaacttatcgtcacggcgtttataccacagcgcacattatgcgtgaacgggctcatgcatctagcgtccgcaaagcaatacagcattcaccgatctgcaccacttctatataggaccgctgaaccaaattcatcaagttcatcttttcttcttagctcgtcacattttagaccacgttcaccacctcgaaatccatacgtacgcctgcaacgcgcgtgcacagtgacgggggcatctcactcgatggcgtggcgtagaatcccaacttgtcagtggtatgcatgatcaccattcctcacactgcacttgggcttcttcggtacacgagctcgtttttcactgtcttgtccaagtcctcgggtaggaacttgacaagaatcttgcaattgtgcttcacaccttcatctccagcgcaaaaggtcatgcacgccgttgcgtcttacaatctcgtcggctaggtgtatgtacgccgtcaccctggcctcgtcggagatcgacgcgtcgagcttcaattcgtcgccgaacacctcgttcatgtctggcaactccctgtgcttgaggctcaccgtcatctccttgatcttggacatcagaaactcgtccttgaggtcctcgaagtcaactttgtggccattttccactgtatgttacgtgctcccagccagggccacttgctagaccagcgattcatttcctgcaacatcatgaggtcgcccgacgtctgttggctgctcctcctcctgcatgcggtttcgcctccaccacgagacacaggaactcgctacccgcgtgtttctcacagtccttgcttgagctgaccacaccgccgttgcgccttatacttcttcttctatgctgctgcataccggcgtccgacacctgcttgtctaggacgccttctcttctggccacggcctctgctgtcatgatgcagcatgtctgctgctggcacccacgcaagcgggtacgccagcaacagacatgctcaagaagacgtacctggtggctaggaagccaggcgtcgcagcgccgccgcctcctcctccgccacaagtagcttgcgcgcagcgtcgcttgaaggctggcgccaggcttgcgcaagactgcctgacgcccggaatccagaactctacctgcacaagtatacaaacatgcatatataggattacgaaaacagaaaaacacttgcatttagtataggttagctcagcttctagaacgacactaaggagaaagcaagaggaagacctagcgcctgtagctagcccgaagacttaaaggcatcaatctcgctttgcattttacccaaaagctagcaagcaaccacaacaactccacgcactttcgctacggcaggccccaccgcatcggagcctgtcatctgctcgcaacgtagcagcatcgcttcaccaaactctgccctctcgacaacgcaaacgtcactcgtctcctggagttcttgccgaccgaagctcccccagcttgaattcatgcgtgagctccctagcgagcgcggtcttcggctcataacctgttgggaaccgcagcttcacgcaggcaggaagctcactagttgaaagaggaatgaggtgttctgccaggcagcaacgactgtctgtggagcgtgtgtgtatttcttgactgagcttctcgctcgtacttagtgtatcttgcctcacactgtagtcgtactcacaattagcatgtaatggacaacctccttaggacaattccactactgtgggaaaacctccggcacttactgccatcacggggcgaacgacccacattggaatatgcacattacctagcgaccaaccgtgggaatcagtatatattcgcaacacacatcattatggaagatctcgcacatttttagccagtccgacttggactccaagagagcaatgtgcacaccatgggaattcagcccatgtgggcgtcatagaattattttaactactgtatgctatccgcatacagtaaatgtaatatgtgttgtgtactcgaagcaacgttgtgggtcaaatcgtatgataaatctgcgggatccgacccggtcgggctgcccgactcgggcaaggctcacttcagcatttgcctcgcttaacgcagacgccatagccgatatcccatcttaataccgatgagaactgttcctcgaagttcgtcgaatgccactattttactgcttgttttcgctgctacggtcgccgccatggaaaacttgggacatcactttcccgtccaagaagagccattggacgacaaagccagcgcgagaacgttgagatccgaagcgttcctggagttgagctcgccgacctgtgaatgtaaatcggctcctcgaccgtgcgttttctttcacggtatcagcaacaagaacgaaatggcggagctccaggacacgcccaagaacacaagcggccagatcggcaacatgaacgaccgcgctccatgctgctcgacagtaaaatacgcggtgataaacaccgtcgacttcggatggacggctccagcggaaattctgcggccgtgcgctctcaatgagcgattccagtgatttggcttcgcgtattatcgattctcttgaattcgtgtgcgtctgacctcatttttgtatgaaaacttttgcgtttcctgtgcgtctgcgcgcacacgaattctttttgcccgtggcgaccattccatacaaactgctgttacgctgggagatatgcagagtccttacgaatttctgtgcgtcaaacgcacagaaaaactactgtgagcctcgaaactcaataccactccatcctgatcggagcagcaagagtcttgttaatcgctagatagagatctctgggggtgcgcacggatggttgtgggctctatatcgagacgaccgaaagtgtttgccgtgcatgaccgcgttcacaattcccaaaagttaataaagggcagactgggagccgcgtcctgcgtcgccaggacgcgacatcaatccttgtgctactgcatccacgctagggacggcacggacgtaactaggatgaaagttaagacgagttggtatgcctctaattaccggctcacacctgaggggagattctggccgctcagacctcaagctcctcgcgcagttcgcgtgtgagctctctgcagagctctttgcagagagctcacacgcgaactgcacggagagcttgtgggtggagcgactcataccaccgtgtgagtcgcacgacggtgcagagcttgctgaaatcattaccgcgtgccgacaccctgcgtatcgagctagagcacccttattagcgactaaggaggatggcaagaagagagacgcgaagaagcgctgccgtcggacatgtacacgcaggatgggaggaccgtgtgtggacgttgccacttgttgggctgcagcagaagcaattaccgacgctcgctcgcggcctgcccttactgcaaccagcgtggacacatcggtgtcgggtgagaagctccccggtcgagacgaggggacggtggtggttagatccccacgaaggcgcaataccgcatacgttctattacgtgcaagtaaagtgcgtgtgttaggtggtggtaaacttgtgacgccagcactcacaaaccggtcggtgctgctgctagctctctggttcacccacggtggatgaacaactctggctgggtggatccccgagtcgccactcgagcgatagcagacgccacgggtccgcacctttaaaagggttaacgcgaaagtgaaagggtttatgagcttctcggtgcgtcgaattcggactaaaagaccagcgcgagaagcttgccaaggtgaccgacaagatcacttggcttgtcgttggctggtcaaaagtcgcacaccacttcggttaagtacgatcgcaggaaagtcgcacaaattcttgctacatatgaggacacagtcgtcgtaacgcactcgatgggcgggcttgtcatcgcaggcgcattggcggcagggaagggcagcttaagcaagagctcggcgtgggttagcagcagcgctccgatgatggggagcatggctgcggactatatccaagagaactgcaacgatgaagtaacgaatttcaagaccgagctgtttgaatttctcgattattgcccggttcccgtggcgcgcaagtccatcacgtaccagaacgaaaagtacagctcccagggactgaatgctgcgtacgccgcggctcagaaagcctacggcgataatgtgtacgctgcaatgtgcagcaactattacgacggcgtggtttcgcattaccaaacccagagcatcatcgcgggcatagttgttccacacaagtcccgtgaaaatgacggtcttgtcgaattccagagctacgcggcaggtttatcggcggcgttgtttggagatagctacgagtatcgcttttacgcccccaagctaaatcacgccgacacagctttcctcacccacgatggattattggaagacgcgcagaaacccttcaaatggtttgagtgtgtgctatagatgaatttcgcaaagatcccagctagccgcatcttcaaagcactacagtaattaacggctgggacgcctagaaacaatcttctttttttgataacggtgaggtgtatggagttactggccatgtatccgaacttctaatcccttccatcctcaagagcgagaggagttggtttgatatataaaatgtgcatgtccctggaagctaagtcgtggcttcgcttagagagaagagggcatgaggatttattgtcctgtgttcgtgtctgcccatttcctgtaatcattcattaagaagctgagagcgcccgggtatcgtcgttcaaccaggtccctatctgtgggttcatcctgctgacttcgtctggaatccatagcgaggttcgcaagacaatccgccatcttgttgtggcaacggtagtggtgtctccatgaagccacgcgcaccgaatctgctaggcaccgtgctctgtcataaataggctgcagtacccgtgcttttggtcgcctgcgctccctcatcctgcgtaagacgagttgactatctcctactatgtgcacctgtttgagtttgcgctggtccacgtggtgtagcaatcggagcaatccgttgaattctgcgaaattgttcgaacacgtaggccgtagcagcgaaatgctgctcaaccagacgattcgtggtaccccgcactcgtcgacctggatgagtacacttccgcttccgcctggtccaggatttccacgcgatcctccatcgaagaagccgacatagtgttcgggctgcgatggacttcctcccggagctgcgatgtcgtctgggttgtgttggcgcagacgcttcctcgtgtccatggcgctggcccagtcgccctcatttttccgatctagtttaaatgttgaagccacagtatcaaaaccagtctgtagccgagcgtgaaaagaggcgtcccgttcatttgttgttctgcctgccgcggtcgtgttgtaaatcaaatccacgcgggctcgccaaatcgacgctagcgcttctaccacagcaaagctccagtatttgttgacgatagcatgaactgcatccgtagtcgtaacttgtgcaaacgggagttctgttttgcccactccattccgtaacgcacgcatttcccaggaggataagtcagtctacatgagaagatttcggtaatgctcggtgcattggactcagtatcaagctgcgcaaaaatgcttcgagtagtcttccacctcctttgcgcgtgcgggcattcccaaaagacatgagaaagcgcgatgttgacgtgatgagtgcattccgcgtgggggcatgcttggcgcttgagcggtggcccacagcgacaaagcacggagtttgagtctatacaggagtgagtgctggtatgaggaggtgcctgggattctcgaaatgctcatccattggacttggtccaaagccgagttgataacaccgctttctcgggcccacgcaattgctgcgttttcgattcgttgtttccccttcaacatccttttctctccagcgtgacgcttgtatttcgctcgagtttgcggccaccttgccgttccggcccatgtgactgccaagcgagtcaccagttggtacaccgtggcgacaggcaccccgagaaaagtggctatggcttgatctaacagtggtggagtggtatgctcaagaacactgggctccatagagccccatgtgtgagttacagcatgcgccggtccatcactaagcaggagttcatgatgtgggtctggtaatttgtggctgacaataatgtaattactcctaagctccttcagggccaccccagggaaaattgccagtatcactaacgagagatcacggacttgatgcgcaagttgtgacgccatcggatatgcaaaattgctgcatttccacttgacaacgcccggtttcacccattccaagttaaaaacatcaattactctggaagaagccggtgccagtagagaaaagcgtttgcacatttttccagctgtcccgtggaagtaaagagtggcagatcgcgcagtttcagctgcttgacgccttctccgacaaagcggccgaatcgttcttctatgaagcgtgcgtaagtctgaactgcgatgagtattgaagggttggtttcaggatccaaggcgggaagcgccgcaggagaggaaggcggcatttaccgacagcacggaggcagttaggaatggatattttcaagttcaaggtgaaaatagcttttgaggagagaaagcagagatgaaaccaacgctcaagtgctaggagcagtcatagaggtcgtagcgttagtttcagaatctctgtctgccgcttaagccctcctgctttagctttcagccttcagcactccggtcatggtgagacttacaagccgctccttccttcacctgacacctgaagtggtgcagttcgaagcagagcatccattttatgctaaggtcttacagctagactcggaggaggtgacgtttcgcagcttggaaggaggcgaagggaaactggaacgtgccgtcgccgaagatcacgtggttcgggccagtgaagtttctcaggccggtcagatctcgttgctccgacgacccgtgtccgtcagtttagctggagaggttcagtatggacaagtgacctcggtcgaccagagcaggatccggtggtcatgattttgtggcagcggcagctgcagtgtcagtggtgccaccagtgattgttctgttgcttgaagacgtcgagttcagaagcgacgagtggagtcctactgacctagaggcgatggagcagtcaattctgagtcagctgctcggtaccggcggtagttctgcttcaaatcaagtgtccgagatactggaaggtctgatgagtgaggaaaatcaccctagtggatcgacccaagaacaggagaggaagctcattttccactccagcacgctataaatttcgcttattacgtcgacggaggggtgtcaccagtgccacgcagcgtaggcaactcattttgcataccaccaacgccccaaccgcttcggagcacatccgctttgtctcgcggctcggttcaggacgtggaagagctctttgacccgtttgcagacgacgatgactcgccccaagacgaatcggaacgcggtgctgaagttggtcgggcaaacactaccacacaacacgtgacaaaacgacagcaagaggtcacggttgccaacggcgacgatggccacgtcccctccaagcgacaacgagttcaaaccgctattgatcaagacgcgttgattatcgcaaaaataagcgacgaaccggaccttctcgagcgtttcttgatgattaggaaggaggccaacgtcaaagcgcagccggcggagggtggtggtaccatgcgtactcacgtacagaagccatcccctacgacaaggggaaagaagtcgtctaagtacgcatttgcaccgtccgaggagcaggaattagttcacgagcgcataacaacggagaagcacaaaggtaagtctgccaatgtgttttgcagaggtttagttcggtccgagcacgtggagttcaaagccgtacctggaatttgtacgcgggcctatgatattcgtttcggttctggtggtctttcgattcgacactttgcaagactatcgagggatgagcgggtggcttggttggaggccggtggttcaaactttgacaatttgtccgcaactgcagaattctcggcggcatcgccggcatcgcgcatcgaagatgttgtggactctgccagggtttcctcacctatgctcgcgagttttgctgtgctgaactggtcgaattggttgagaccatcgtgaagttcaccgcacacacgctatcgcaggtatcgtggacgccaaaagagatttctagcttagttttctgggtaaacgacgttctcgaggattttcgtacagcgtctgatgaaggtggtgagcttcgagccgtacagcaacgttgtacgaccgatgaccggttgctcaaggatgtgatgtttataaaggtgcatcggcaagtgcaggatgtacgacatgagatgatgtcgggaccagcacggcttgagggccacgttgaacaaggatcccagctccgcaacggccgcaaccacgacggtaagaagcgatttgggcgaatccctaaggaagtacttcgcaaattaccagtgcagaacgaccccgcatcaggaaagtcgcgacgactgtgcatgcgttttctctcagcggcgggttgtgcggtggacagtgatggcggttgtcccagcgagcatgggcatttcgttcccaagcagctacccgcgatcgtgaaaaaagagattgacaggcgctttggtgggctgaaggacgagcacaaagagttatgactcgttcagactggtctggcaatgtatccatcacgaacgcaaaacgaccgaccgtcggcggtgccatgcaaagccgatagggtggcgcgaggtcaagtagcaaactgcgttaacacaatcaattcaagtgatggatctcagacggtgttggaccagtctagattacgcgtgcaatcgaggcccctacgcgactcaattagggtacccacaacaacgagcatgattggcgaggtaatttgtgcgcagtcggcgggatctgcggtaaatccgacagcgccaatggcggctggttgcacagatagtcgtcaatcgaggccttgttatgacacagaggcagacgcaaggagcgagaccggcaaggtatcctgcacccgggtagctgacttgcgttcaaaatcacttgggtcgtagcagttgccggtggagggtgcatgcgtttgtcggttgaggtgttgcagtcacgcccacattagtctgtcattggattcggcgcgagagattcaatcatgtttggaagcggatttacttcgggccgaagctcgaatttccgtcctgcaccgcaaacgggggttcgttagtgcaaagcgacccgcatctcctgtctacgcaattgacgaagtagcctgcccgtaattcgcacgcacaatatgtccctggaagaggctacgcgatgtgcggggtgaaaatagcatagacagcagaccgaacaaagccatcgatcctgtccggctgcggacagttcttaacggctatcaacatctcgatctactcgttgaaattgctgagaagggcatcgacgtggggtggagacaagggccgagaccgcggcggccaccaccgaagaaccatggttcctgccgacgttacctacgtgctgtcacaagaagcattcgggatggccaagactccggtcaatatttgatagttgatgctgatatcattgagcggtggccagaactaatctgcagtccgctcggtgctgttgagaagaaggatgtggacccgatggaggaagtgcgcacaattcacgacttatcctacccaaaagacgactgtataaacgctgcatttattgtcgagtcggtgcccaaagtgagatacgagtcagtggtagttatcgcacggcgcatcgacagtttagcaaaagcagggcatgcaggccggatacgcatcctcaagggagatctcgagagtgcctttcgccacttaagaacacgcgcaaactaggtcttcagaatggcggcatatgtgaaagaactcggcattctcgtcgtcgatatggcggcaccatttggctggtcaggttcgcccccctgctacacactctttggccgtgccatcacgtggcaaatgggcagaagttcacctgcagcggtgtccgactcgagcgacacgaacccattgtttccttacgagtgggtagatgaccatgtcttggtcgaaccggatgtccagaacaggttagaactcgctgaagctactttacgacacgctatgttggctgtcttagggccccgttcgatcaatgaggcaaacgtttcggaatggagtgtggaaattgttgctctgggtctactatggaacaccgagcgtcgcaccgtatcgataccagaagagaagatcgctaaagctcgtgctcgcgccagtgcggtggagcaacgcggcacagcgtcaaaatccgaactgtacaagctactgggttctctttgccacgtggctaattgtctgccaacagccaagccgttgtaccaacgattgcagacactgtgtacatcagcaccacggttcggcagaattaaacttacagcagggaccaaaacagatcacgtgtggtttcggcacattttaatgcatggttgttttgctgaattaccgcttgcgatgtttggcgagctgccggcaccggacgtggagctgtatacggacgcgtccaacctcgggctagccgtgcttgatcccgcctgcgagtcataaatacagatccagtttgatgacgaagagaaattgctcatcgacaaagttggtagcggccatgacgatttttcaatcaagcgaacggacgcacaattcatgtcaagtgtcggagtgacaatgccgcagccgtgagttggtgcaatcggatgcactccaacaacgcgttcagccaagaaataaatcgggcgattggtctggctgaagtgtatttcaaccttcgagtatcggcggatcatattccaggatcggccaattggatggctgatgcagcttcgcgagcttggaccgaaccatacattgctcgatggactaatttttcttcgtgttgggtgcagacacaagttccacaagaatgcaggaaaatttacatcgacttctcgaatctcttcagtccgagtcactggccacaacgtccaagatcaagtatgcaagcacatggacacagtggtgtagaaggtgtgagcggcttcaattcgcaaaatggctgccagaagaccgccagcaacattcgtaccagctcgcccttttcgccacgaactgctggaaatatggctggggaaaatcgggatcgaggaattctgcctcgaccgtgctctctaaagtcagccatattgcgtggcatcgtaggcgaacccttggttacatcgtcggccttttgccgggccaccaactcgctatcaccggaatgcggcggaaagacccatcaagcaagccacaacctcccgttacaagcgcaatcctcaagtgcctgcatgagctcctcgatttcgcagttgcccagcaccgtgtcatttggggggcttcggtactgggcttcttctttcttttgagaagatccgaatatttggctcaaggttcaaggatgcacgactactcaaatcggagagcggacgtcgaatttgtggatgctagagccgaaaccttcatgatgtgacttcggtgattctacaatttcgagggagtaaatctgaccaatttggcaagggtacttctcgagaattggcgagatctgggcatcggtggtgttgccttgtactagcagcatggtacctagttcgtcaccacgaggcgctccgtattgatgcgggcgagttactgtgcaaggtggatgcatctcacaatttgcaagtatccgacgtggtaagagcgataaaggctgctgctggtcgagctggccataatccgcaagactacgcctcgcactcccttcgaagtggcggcgctacggcgctgtttaatgctggttttgatagtctggcagtgaagctgtttgggagatggaagtccgacgcagtcgaacgatacacgcgcataagtgggcagttgacatcgcggatggcgtcgcaaatgctgcagaagcccgcattgcatcatgtttaggggcatcccccacgcccggataccccggcagtggtggtgctacaatgcaacttcgtcatcgttgtgccgcgtttggcacgcccccagaatcgtgagcgacttcgactgaaaacgactgcgagcagcagtgcgagcaggtagctctcattcttcttttctccagttcgagctcaatcgttcagcctcaccaagtgccctctctcgcgctgcgtcgatggagacccttacgtactactacctacgcccgagcgccttcgacacgcccggctactgctacggtatggcccgagcgccattggcgggttcggaagatctcccgattaagaaggccttgagcggccgctggagggatgctgacgattacgaggtcgacctcgctgcgacaagagtggagaaacgcgtggttacggaggcggaagcatcagtggcatcggaacctatgtggggggctacctgtgcctggcgagaatcccgagtgacggtccgagaagatgggattatggggttgtggtcggttacacgtcggtggcggagccggcggtcagcacgctacacctcattttcagcgatggaccggaatccgtaccattcgatgagtcagcctttgatgaattacccgtggagagctatgcaatgcggccgtgtctacaccgctcagtgtgtgacgtgatgttgggcgagatgcagagctttcacaaacaagtttctgccgattttaatggagaaggccgccagcgtcgtgctacccgcaatttggcaacgattttttggcggtatgacattttacctaccgacgaagaaacccagatccctctctatgattgctcgcgtggacaagttcctcgagtctctattaagtccgttctcaattacgtctactacaactctgggcggcgacgtccaccagctaacatcgaggtcggtgcaaccttgttcaccagcctcctttgaagagcagctcaggttgcaggcccagcggctccagatgcggccacagtacttcagaagccagacggagcacctacccggacagtacgcgcttctcaggacgcgcggctactcgactcagacgaagatagtgactcgctggaagtgtcgctgccattaccagcaacacgaacaaaacgtgtgcggtccgacgacgaacagggcgccgatcaaggacggccgcgccgccgcatgcaagggcttcataaccaggcggagtctcattccgctatcgcggaacttgatgatatgatgagtgctcaaaatggtgtctctctctcgcggacccatacgctgcctgtgttggggtcgagttttaaagcagcaattcaggccatctgcggtggcactgagtattcacaaccgagccgtctcacgtaagtatgccaagctatctcctgatgtgtatgtggaatctctgcaatgtgagggtcaaagtctgcctttgttgctacacccagctgtcctgtgtcgttttttctctttggattttggtcaacgtggtttatcgattcgcaactttcgtctacttagtgtgaatgaagctcgcgaacttcgacatcgctataacatgactgacttttcgaccaagaacgtcatgccagccatggacagcttcaagacgctcacggagctggtcgatgctctgtcatgcctctgtagtgtggtcactatcgcgtgttcggccgagatcgtaaagctttctgaacacgctcgggcattcgtcagtgtgctgattcgcaatcgtgtctcgctcgatgccctcgcaattgacgagctcgcatactggattgatgaacggttcgaaatgcttcgagcattgctggcgcagggtgaggaccaagcgtgcagcatcgttactctccaattttcagtaacgcacgaatcctatcagcagctgatgcagaacgtctctgagaggcgacatgcggagcttactcagcgcttggtaaagttcgaaggctgtccaagtcatggtgatcgcgggcgacacgctaagcgccagggttccggcccaacagtgaaaagatcggatcgcaccgtcaatcgtctgggagtcccggctgcagtccttaagggactccctgtggagaacggaaagtctttgtgcatgaagtacctttcaaaccagccctgtcgcggaaatgatggtacctgtgtattcggtgagcgcggccacttcaagccgaaaaagctccccgatgtcgtacgaaactacattacgaagaacttcggtggattcagtgctgaatttcaagatctctgatggggccaaggtgaaccgttgggcgttccggcacctttggatttgcaacgcccactatcgaacaccacacgtgtggacttgcagcaagtttcttccccacggggcgccaacgtctcctcacaggcagatccgtcgccctctgtacatgttcgccagctccaaaagcggtttgcaacaacacaagccgcacggacgaggctactcgagctgcaccaggaagcaggacgtgtacggctccatgcagcgttacaaaaatttgatttgcgcccccggcagcgttccctacgcaagaagacaccgagacggcaccactgtttctgattgatcgtgaaaaacaacgcgcgtttagtgaatacatccgtcgatctggatgcacgctgccggaatttgtacgactgctgcgaaacgagacgccggacgatactagacccaacaaggcgcttgagattccaactcggaacagagcttggcagtcgtacccccatcgccagttgtgggagcagattgtgcatcatggtgtccggccacgatggaagtcacagcattcgcgtcaagcggagcctccaaaagatcacggatcagcgacccgggctctgaacatactcgccaagaatattcgaaaaggtcaagacgccaaccaatatctagtgctggacatcagtctatttgaggtgctaaatggcttgacgtgcagtccgtttggtgcagtggcaaaaggttccgtgccaatggatattgatgcgaggatcatacacgaattatcctttccgagtggtgattctgtaaatgatgagactttgcctggcgacgcgattgacattacgtatgatggagcgcccgtcgtcgcccggcgaatcgtcgagcttcgagaagcaggacacgacactcagatgatgacaggagatgtgaaagatgtgaatgccgctttccggcatatcccaatccagtctgactacgttgggcgattttctggttgtgtacccgaactgggcatcctcgttatcgatctgagttgtccatttggttggacagacgctcccgggtactactgggttgccggtgcggccattaagcacctgtacgagcactcagcaccttcgtggagcggaatgattcaggaagagcgagagcctttcacatgctcggcgtggtgcgacgactacatctgcgtgaaaccagacatcggcacacgtctacctgaagctaatattgcgttacgatcggctatgacggaggtactaggacccaagcgtgcaatggcgacaagttctcgttatggtttgtcaacggcaaggcgcttgggctaaactggtccttggaggaaggaaccttgtcgatgcccaaggagaaaatagaaaaggctcgctccagagttctcggaatgcttagtgctgtatctacgacccgaaatggcttagatcagctcctgggaagcctacgccacatcactacgtgtgtgcgtccagcagcagcttttttccaacgggtagcgtcgctgcatcggaaagcaaaccgctacgctcgcattcgcctgaacgatgatgtgaaggatgatctgaggtgatttctcatcattttggacattgcaccgctgaatcgcgtgggattcgacagatttgccgagcgcgctacacccgacttcaccattattatggatgcgtgcgacgggggcttgtgcgccgcttttcccgcccgaaaagagttccttcttgtgcaattcgacgaagaagaacggcacgagatttcgcagcttaaacagggtgggaataactttgacattaatgtccgtgaattactaagtgcggtgttagcggcagcaatttgggggggggggggggggctactggcactcgacctcgtcgcgatcgcatcacgtacgcttcaacattgacaaccaatcggctgtgtgctggagcaacaagcggtccagtaggaatagcctggctcaacttctcttgcgttcgctggcgttgatggaggttcgctacaacttttatacgactgcacaccatgttccgggtggagaaaatggatttgcagacgcgggcagccgggtgtggcaatcgcagacacacagggaattatttgctaacatttcgttgtcttggacgcaggtggaagtgccacccgagttgaggaagccctcgaggctttgggagcacttttgcgagcaggtgcactcgcagaaacctccactcaaagctacggcagagcatggagacagtgggaagagtggtgtgcgttcatgaattactctgcctggctcggtcgcgatgcaattgatcggaacgcagcccagcttggggcattcgcagtttttctttggcgctatggtatgtaccggcaaaaacgaggcaaccagtactctacaatttgtggtaaactgtgcgctgtcaggtggtaccaccgtaattacaagggctacgatcctggtgtaaatactagccatgcaatacttctccgggggattcggcggttcattgatcctgttcgcaagaagcagccaattacggtgcccctggtacttgccgttcgtgggctcctcactcgcacgcagcgacgacaccaattgatttggggcggtctacttctcgcttacttcttcctccttcggcgatccgaatacttgtacatgtcacgactacattctacggctcggcgatatctctttcctggacgggcatggccaagcgaccacccctcgtcaagctcgaatggtctgcatcaagctcacgggggcaaagaacaatcaatacggccgcgaagaactacggtacctgcatgcttcaggtgacgacacgatttgtccaatactaggtgctcgatggatctacaaagcggcaatcaattacggtactctaccaagtgatcctgcgttagccacatcaagtcgtcgaggcatcacttcaaaggcgatggcctttctgatcaaacaagctgtggtcagtgtagggcttgatccagcacggtactccacgcattccgtcagaattggaggtgcgacgaagctcctaaatgcaggtgcagaccggttggtgatcaaagtgctcggtagacggttatccaatgccttcgaggaatacccagttttgtcggccgaaggctcgcgcgatattgcaagcctaatgtgttagagtgcacatcaagtcgagccccggttagcattgtcaggcgaagaagtcgcagactcgagcacatgcacagtcgcggctgttttcacttcactacggctcgagctctggcacagtcgtcagctgaaatcgcgattttggtcttggagagatcatttggttacaactcgagcctcggcacagttgtcagcggaaaattgccgactcgagcacatgcatagtcgcgcaggggaaattgtttggcagcaactcgagcttcggcacagttgtctgcagctacaccgactcgagctgacgcacagtcgggaagctgagatgtgactcgaactcgagctacggcacagtttggcacaggtgaaacaagtgcactatcacgtgaaacaagtgcactatcacatgagggcgcgaagcagcaattgagttttggggccgccactccgcaccctaattttcataatgcatgtttgccccactgacgaagtgctgattgttggaaacggagatcacacactaacttatccatcgtgctgagcaattatgggcttgtcaacattcatttcacgcggagggttagcctgaaagattccgagggggatcgcaattgatttatcgacgttgacctggagccccgaccgctctgagaagcgtcccaccgctgcgatcatttcggcttgcattttccggtgcttgatatatattgcagtgtcgtcagcatatccagcaacgtgaagtcgataagccccggtttgctcatgtagcatgataccacaagcatctgccgttgcctcgagttcgtcatagaggaggtccgcagctagaataaagagtacgggagccagtggcagccttgtcttatgcctctagtaactggtattggcgccgaggggtatccattagcgagaagcgtagctgttgtattggtgtgcgtcacttcgaccatgcggcaaaattttggcgggaaccctttggcccgtagcactgccagcaagtagtgacgatcgagcatatcatacgcttttgcgaaatcgagtaggagtgcttgagcgactagaagttctgggttggttttgcaaacgcgctttgccgcctcgaacaagttgatagcggtgtgaattcttcggtcgggaacaaacccgaattgtgtttcgtggaccaggttcgaaatgtgagaacgcagtcttcgtgtgaaaatgcgggtcaggatcttgtagtcggagttgagcaaggctatcggtctatagttcagcggcaagctcgcgtctccttttcataatactaaagatgtagccttgctaaaaactcgacggaaaggctctgggggcggatggagctactgacctcaaagttgcaggttacgcagatgacacagccatttacgtggacgacgcacgtgcacaaccggcagtgcttgcagtagtcaaacaattctcgcagctctcaggactacgggtcaatatcgagaagtcggtcgctttcccactaagtgtacaagccgattagtcggagattgactatcctattcaacgtcaaagcgagtgtcgctacctgggtcactgggccaccacggtgtcagatgtgaagaaggtttgggacagagcttttggagcactgaccagcaggttagcacttgctgttgcgaaaacaaactcggtcacccagcgggccgaactggcaaacgctataatcttgcccaaactgagattcgtggccaaacacgcgtggccaactaagaagaccctcatcgaaactagcagccggatacggaactttgtctggagaagttcatttgcaaaaccagtcgggaaagtaaaaggatggctaggtggaatagcagccgaacttcccccaacggaaggaggtttcaacttgcccaacatcgtaacagaacttatcgctatgagtgccaaaatgacggagatatgggcgctctcgtgcacccccatcgtgcgaatagctggagatatacttaggcgagcagaattggttggtccgactcctctggtccccgaagtaatcaaaattccaccgagcgcagcaggcaagacacttcgcggtaccggcgacaagtggttccgatttgccgcaaccagccccaaaacaacagactcagtaaatcacgacgcgaagcacgcctagcatgcaccaacgcggaaggggtgactactcgttgggtgactggggagcccgaatgtgacctgactgccattttatctggacctgtggcaagaattgaacgagcactaggcgcggataagggtgaattcattgccgagggcgtcatggacacgaatatcttcgatttaccgtggtcagtgcggccaggggaaccccattcgatacgaagagccttcaacttattagccgacaaaggctcaaaggttggcgatgtgataagctacacttggattcggcagggtgtagtgaagtggcgcgcagaacggattgaatactcgatgtcatccaagcaagcgcgtcaattcaggcacctggtattgctgataatgacgacttatcctggttttctacgaaagccagcacctcttaatacattacgagtcactcacaatgtgggatcccaccacaactttcaggtttcgatgccaccggcagcaagagtctaccacgtacaaagtactggtccagctaagcgcgtgaacattcgtcatgatgctactctggacgatgtagtggctacggagctggaaactacggcgcagaccaccttctgcactccacaaaaacggctgactcggatttctcctgtttgggcaggcaagcgccgctggagacgaaaacacacggcctacaaacgcattgtgggaagccgactagccgaagctgggaaagcactattggataaagctgcagcggcatggatagccgaagacccgagcatcggcgcggcaatcgcacacgttgcctggaatgacttacggaaaattagtgggatctcggtctacaactacgaactcctctaccgattcaagctacgccgactgtcaggatggaatgacagccagaactcgcatgcgtgtccacacgcagcatgcaatggggagcgttccacgctctcacacatcttctggaggtgtgaatcagcgcaacggatgtggagggtggtcctcggggggtggatgaacgctgacggcatcaccagcgtgcttactctggcggaaatcttctcacttcagctgcgccacccgccggaacaggtcctgacccaactatcacagatccaaagagaacatgaaaacgtcacagagatgtaagattgtctttacggcgttgcgaatagatactggagagcagcggtggctacagtgatggctataatatggagaaatcgtctggatctgctgcatcctgccccggaatccccatcgaatgaccaggcccgcattgccagactaaatgcccgccttcgacaagcgtacaggcaagtaacgctggacatacctctcacgaagacgcgatatccggagtggaaggtggcgcaacggatgcaagccgcgctgtggacaacaatacaacttgccccttgcatcccaacagctacagtgcggcagcccgtgggattctttcatggccggtcatcgaaccccaagcggcatgggggatttggttacgtgctggtacgccagacaacaacggcatactacagcagagtgcaaccaccggataactgcacagcgaacgcggctgctctacactcgctactccaactactcaatcgagcatatgagttaaatctccgcgggattcatgtggcaggagactcaacagtggtggtccgctaccttcgcgacagacgccttctcaagaaggagaacctgaagcgtttgtatctaaagtgcagacggctagcagatcggatacgggtagatgcatggcatcacattcacccaagcgccaacacaggttgtgtactacttgctacgactgggtcgccactcgactccgacgacaatcccggggtcgacccacttacgaaaagcttcccctcattggagcaggctatacgtgtgttcagaggtcctctatttacgtttgtttaaactatagagtcctgatatcgctgtagactgagcctaattgacgaacggtgttgggatagttcctcctccggcgaaaattgttcttgcaggtagtcccatagcttgacaggcaggtgctctcgaagtagtacagcattggtaaactgagatagttgtcgcaatttgagaaatcctttgatcgctttgtagatgcgtttggaagctggtttccatgctatcgagacaacgtctttgagcgcttggtgcgtggcaatctgggccgcgtttcgatacgcaattttccatgtccatcctctagcgtcttggactagtttcaggactggttcgtgagggttaccaggtacgaatgcaagaacattgcggtcgctatctgcacgccatgagtactgctgcgacagagcaggaaaatttctcggcctggtgggtgccagcgtcgatgtccacaccctcgctggaacgcaagcaaaaatgctagcacaccaacgcctcatttggcgataatgtctgatcgtaaacggttttgtacctcttggaggcgtcaatggatacactcctggcgattcaaccctaacttgcagcttcattagcgtgcaaggctggaacaacgggaaatcttgatgccgaaggggcttcccttttgcatctactataaacgcgttactgctccacttgctggttctccaatagtcagagtctacaaccgcgccttgctcgctcaccgacacgtttagcatacacttgattgtatcccctcgaacccaaaaacagataatcgattcgcgaaaatcacccactttttcagttgatcacgatcagcgtgcggtacaatcaaccggtctgtcaagtacgcccaaagttcacttctaccttgagcttgcaccgtcgacatccatcccgattgctttttgcggcgtacttgatttgcttgagcttttgtcgttggagtaaaggcgcaacagtcccgagaagttggtattgtagggtgcgccaaccaatgccaagctacttgatagttgtccggtgaagtctggatccactgctccgcttgattaatccgggtgatagtaagcgcctcttgaatactttggagccccatgccgccttgctcctcaggcgcaaaaactaatccaggtgagattttatgccgagcattgacctccttcgttgtacctttccatataaatcttttttggagtcgctcgagccgcttcagaatctctatcggtacagtgaaatgcataccagtgaacaagatcgctggtagtattaccgtattgaagaggactacccgttgcttcacggaattagtaacctgggtcgcaacttgcaatcgtttcttacaattcatgagccgtatttcccaattgtagcctgccgtatcgtgattaccaaagtgataacccaagatacgagtggtatcaccttttgcaagcacagggtaaccatgacaccgcttctgagaccatgctgtattcaacgggatcagtacacttttcttgggctggaccttcaatcccgacattcctccaaactgttgtagaaggtggttcagcggaacgatttgacgggtagctggtagaaaaactgtacaatcatctacgaatccattaaaaacctgtcgtctacctccagaacccggaatttccagaccattaatttcagggtgagaagcaatcgctcgaccaagaaaatcaatcgccaaaataaagagaagaggtgcgagcgggcatccttgacgaattcctgaattaatctcccacttcgatgactctaccccaacttgccgaggttcctgtgtgcaaactgtgaagcacatcaagaaacccttgcggaaaaccaaattccgtcaaagccgtgagcaggaagctgcgatccaatgtgtcgttggctttgcactcgtcgagcccaaggatggcggccgagtcagcctatgcaatgcttgcgtcctccagctgggtcagcaacagtgcttggacgactgttacacttttagtcatgagcctgccccgcacaaacccttgttgagccaaactgattatccgtgggagaaatagatggatctgttccgcataaattctgcctaggattgtgtaagctgtgttgagcagagagattggacgatagtccattgcatttcttgagtctcccttcgtccggagtggaacaaccacggcgtcaaggaacgagctcggtaccgctgcacccttctgaatcgcctgatagaccatcgtaagacattccgccatttcatttcaaggttgaggttagattgagttcatttatcctaactaagataacgaccgacgcatccaccgccaacaccgagctcatatctcccgatgccccgccgaatagttgaaacggactactcgacttccgtcgatttggtaccgcggacagcgaacgcggtcccgctgctccgtcagcagcgcctgccctccgaagcttgagttctccactgcattttcctgggccgacgtgcgttccttcttcccaatgtgttgcaggccaccagcgagcgccccagcagcgctttatgcggcgacgtgtcgtcaccttccccgagtcagccgtatctgggtctctgccactgcgattttcttcgccccaccgcaccatgagtgcaccatgagaggaccaccccgtcgcagccagctccatgtagcgcaggccacgttgactgacagcatgctcccgcgcgtcactacgagtgctgtggagggtgtgcgcacgttggagtgccgcacacccgacgatctggtgacctgccagtattgcacgcaacctttgtaggctatgacgaccaggagggcccacggcgtcacccgtggcctggtttgtaatgggaaacggcgcgatgggctacatgtagaccaccgtggaccccccacaggccccgccttccggctgacggtcaaaagaccgccgcaatacgccgccgcacgcagcgacgcagaaatccagcttggtccgcggcttcacccccgagctgcccagccgtggcgtgcaagcacgccggccaggtgcatgcatgcctttcgctggtcgccaggaacgactggctccacaagggagtcgccgtcgtccagtcgtggccaatcagagcgctctcgatgctcaccggcgcgttctgattggccggaccgctgggtcagctggctctatcgccgcactgcccgctgattggtcctcccggcgacttgagctccacgccgcagattgacgagtattccgccatctcatccttgaagtccttgtaaaaatcatgcgagagacccgtagtgcctccagatttatcaccagggagtttgtcgatcgcatcagcaacttgtttctctacgatgggattcacaagttgttgcttctcctccgggcgtaagcgttgggaatccgggatcatatgaaattctcggagagctttctgcatttctgatggatcgagagttgcgtgtgagccccccattatatggttccattcacttgccattttttctgctactggcattgattcggggtagtagcgaccaggcgatggagaaatatcagaggtcgtttgatcacgttgccaatccgcgtgccgtttgtagatgtttttaagattggctaccgtcggttgtagagttctgccaaacgctcgttggccttgtcgtacacgggaattgtcggcgattcgctgtaagtcctctcgtgatttggcttcacaattcaggcacttcctcaaattgttgtagtaagacgtagttctttccttatccattcgcgccacgtcgctgagcattatagagatctgcctagcaaacgtatcccatgctcttgctgggcagctttattggagaaatgtcgctttcaacttgtgtagtcttttccggatttgtttatgaacccattctggtgaagcgcttcgaaaagggtagtgcgatttatttttcctccctgcactggatttacgtagcgtgagccagagccgtacttcctgatgatcggatttattgctcggtggccgtgcttcaatccattgcgctagtcccgcaagatcattgctcatgtagaagcgatccagtctgcttgcagactgctttctccaaaaactaaaatgcgtcaaggggtcaggaacgctatcttcgttggcatgtgttgtgagctgtaccgcatcgagtaggtcgagctgatctaccagtcggtcaagctcgacactttcacaggacttcgcacttggtaatccattaattattcgatcatgagaaggctgcagaacggcattaaaatctccccccagtagaagcagcttgacttttgaaatccaactctgcagatcgctataaaaactgcgttgagccttcctgtccgttggcgcgtagatgtttactagagtccattctcgaaagcgtagtccaattcgtcgtcccgtccactcacttggtctccacgggctgacttgagctgcaatattcggctgcaatagaataccaatgcctcctgacgatccttccatcttcgaccagtaactgaggggttgtttcggctccataataccccacacccggttccacatttctgctacctcatcaatttcctcacttgtcttcaggtgagtatcttgtacatatataacgtcggctggtcgcagacttgtacgttgtttccaaccacgcagccacccagatcgacgctcctttttaaagcctagtaaattctgtgtaatcgcatgtagttctgctcgatgctgtttgttttcttgctatctaacccagatccataaaacaaatctgccatttgctgcagttctgtatataggtccgagtcctccattgcggtagtattcagcatcttggttcatctaatcctgcatggcctccgattcggtcgctgcaatagtttcattctgtatcgctagtagagattctagcgcggcccagtctccatccgaagagtttgcgtaaaatgccctctgcacactagggaaccgctgaagtgcaagaagaaatcgattgagaacctctcttgtggagaactctatcgattcaggacgcccttgcattctgcctagttcaggtgcatacacaaatgcagcgatgagtttccgcgagaggtaatccgttttccgctttctacaaagttgaaggagctgaacagcgtcgggcttgagcttgttcagaacaccccacaaatccggagagtgaagatagctgtcatcaaccattgtagctctttccttccggaagaaatcaagccacgacatcatcgaattgacagcttctgcatccacatcgacaccttcatttcgtcgtcgttcaatcacttcaccaagcttagctatgccaatgataagacaatcaattcgatattgacgggcccagtccagaatcgtattaactttgagcgtcctcagcacatattcaggcgagtcaacttgctgtagccactcgagcaatacatttggatgcgcagtcaccgcgtttttccaggtcactgcatcagccgggagccggggaaatggtactgagctgaagttttcccatctttcttccagcgcattccactcatctcttttaatgcgctccgtgctcctaccacctccagtgaatctactccattggctatccggaggcgcttttgggacgttagagcctagtggacaattcgcttcacgactcgatccagatgaggcgatacttggagtccattccgaagtatttgatgcttccatatccacgtcatcatcgtctggcgtggttgtgctgtcgaccccatcttctagcagtctctgctgccaacgaactaacgttgttttgggttctccagtcatcctagtgatcaaatcgacttgcgagctttcgtcccaattgagattgagcagaagtttttgcagacccggggctagtccatgtggaccttgagctgggaaagcttgtagctcctgcttacgctgtcctccattcatgagtatttcttgtagctctgtctgctctctttcggatagatctgaatcctgaagtgctgtaattaaatcttcattttgtgcatgcgctgccgttgcctgttgtcggtttggctcatttgatcggctctggttatcttgcatgctcgagttgcgaacgggtgttggctgctcggccactacagcttccaaagcaaaacaattctcgaacaattcatcactgggtgattctccaaattgtagtcgggtgtagtgctgagagccaaaatgaataacaatcggcagtgctcctgccttctccccctcaacacaatcttcttgcagcgatgttagccattggccaaccgattcacctccatatttaaattctcctgcggacatcagctcatgagtagaagtaactttacggatgggcttgaaaatctgataactagcatcagcgagaccacttggtgccacgaccagatagatcggtcgctggagtagcttcgttactaacaagagagtcagctcagatccccaaaaagatcgagggatgaaagcagtgctcttcgagctgctgctgcatacgtcctcaatatattcgcggagatactgcgacgattcctgaacaggaagctccccagcgcgctgaatgtgagagatgagaattgtttttctgatatcgtggggaaactccacatcaaacccgtgttccgctgccatttggactccctttttcagtttgattgccaccctttcgaccgcctttacggtctcaggacccgaaaaatcaacattcagcaacgccatagcaatcgtgtagaattgacagttatcagtgcctggcgtcgaaacaggatttagtccacatcgcttcaatacttcaacccctgatagctggccgacgctgacaaggtcaatgtcccgacaaaggcttgctctttctggctcgcgcaaatgttgccgcttgtaaacagcttcgcagttgagccgattttgcttcgacaacgactccggtctcacgagaaacgtcttgcctgatgactttggcaattgctgttctcctccctccgaatcagatgaagagtccgacaaatcgaccaggttaataacatcttcctgtagctcagtatcctccttagctcgcgaggcgttctcttgagataactcggccgccgcttctcgtgctgtctttcctgggcggaacgttctcgatttagatggcgttttccactcctcatgcactcttggctcctgcaacggaaggcaagactcggagtttccgttctgctccttgacattctgactgacatacgaagttccgctgatattttggttagacttcgttttatccttccacatattttcctgttcctgaaaacttgtaaccgtggatttatgccggtcaaagcaagagatttctttcgtcgtgactattatacagccactaccacgagaccacgcatctgagtgagaacgactatgagcaactgcgtgcccggatacaccacaattataacacggcggtgctgggttcgttccgacatgctgcacaagaatcttctttcccatccagttgatgaacttcactttgtccaaaaacgatggacaccctggggacttgaagtaaatctcccatgcccccgtctggaacatttggcgcccgtacttcggttcttggaacgtactgtagctgcctgagaacctcgagcgaataaaggcgtctaatgctgcctcatccataaatcgcgatacgttgagaagcttgactcggtagcgaccatgctgctgttcattgcgcactccgtctacaccaatttgacgcctcctaattctcgcactgcgctgctttggagtatcacccggtcggccgtcggccgttctggcattcagcaacagaaaacgccggttgcgaaatggtacactcttaaacacggtgtgctcgtttctcgtgtccagtagaacatgtgcactgagtgctgctgagaattgtagcacacttgcttggtttcgcctagcatctgggtgagtttggcttgatcaatgccgcctcgcttagcgccttgaagaatagcccccaccagtcgctctctcgtttgaaaatcggggtaaacggggaattccataggtagctggaaatacagttctccttcaacttgtgcatatatcgtgttctggattgctctgagcatgtcattatcacacgtcctctttagagattgaggtagtccttgcgccaatatgttgccttcgagtaggccttgtgttatcatcatctccacagacgttggtgcgcgtaattcaaccgggaaatcatgctgttcagtgtacgccgcccgcattgcttctatctcctcggatgaatacacgtcactccgaaagcgcacaatcgggttggcttcttccattggatcatcttcctggctatctgctgctcgtgctaacgggttcgcagaccatgggttagaggtggttgtagtacggaccttcatctcgctctctcttagttcaatcgtatccagtagagaacgacgcgagccgtagatggatttcgtgagatcacgaagccggttcttccactgctggcaagttgctccatcctccatgacctgggcccaaaacagccgtaggagcccatctaattcgacttgcaacagcgtcggaaagtgatctttttcctctggtaactcgccactgccatgcatcttaaagacagttgtgaacatctcctgcatgaggtaccgatcctcagagctgaccgacacgggagtaacggctcttctatccccggtggtggcttgaacatggctcagaaagttatcgaacagtgtcgggaacggtagcccatgtgaggccgcacctggtggtccatctcgaggctcttcttctggttcttcttccgtcgaatagtttttgtcagtttttcttgttttctggtttttctggttcttctggtttgctcttcttcacattgcgctgtttctggtggtgatggtggactggaaaggggacacgctgggccaagctcagtcgtctcttcatcatcagccgtattgccactctcctttccagctgtagctgcttcctgcttgcaatcaccgctatccagggaggaacggctcacgttgccctcagctgcagcttcctccatcttctgccttgctcgcagcggggggatcaccttcatctcccattaggacagcacttcacagggtcgcggtgctctcaatagaaggtcgtatagttcagccaagacaaatctttcgctggaggcctgtggatggctccgttcgttgcttcgtgtgggtcactcccaatacccacgggttaatcttggcctgctgtcgctttgacggttcggcggctaaatcgggagtggagcaggctatacgacaagacatctacatgcttgcgcaggcgcaactggatacgggcatggcagcccaaagccagggtggcagacatcagcagatctagatcgtgccaagttgcaggtcttttgatcggctcggttgttaggatacttttaagtaatccaatatacctcatcatcatcatcgacggaaaggctccttcttctatccatcgattgtataaaatcgtcaaaagtggcactacaatatcacaatgatccttgtaccagtcgttgccaagtttgtctgggactgcggatttcccacgcttgcacttgcgaatggctgcctccacttctgcttctgtttttttgtcatccatgtcgctcagagcgtatttggcccaccctttcttcacccctccacatattcatcgatagatttgacatccacgctaccgctgttcaatacaggaaaccacgcatctgctagaatattagctttgtccgcaggatcccgtttcgcttgcagtccactctgcttgaggtcatgaataatgttgtcactaaacttcgtgcatattctgcgaaagaaaaacttggtgttggcttttccagtccaagtgtgctgtcgcgagaggttccgcctccgcagtcttctacgtcgttgttgtatagattgaagttggtaaagtagctgctcccttttgtccgaagctccgtgttccctgctttcacacttcttgagtttcgtcagcactcttcgtatgcgctgccgaaaacctcgagtcatttttcgtcgacgcttgagctccccgagctcagctactagccccttcttgaaacgatcccagctctcagctaaacgcgcggcgtccacgtcgcccattatatcgtgtgcttgcttgtgaaaatcacagattcgagaagaaattagatttttagcggcggcagtcatgtattcaggcatggggtaaatttttggcaggcgtttgctgcgcagcggatttgtgagattttgcagctggagagcaacaccgtcatggtccgagcgaattggacacacgatcttgctcacttgcttaatctacaactgcattttgctggaggtaccacctgtctatccggcttgagcctaccctttcatgtgcaagcttgtagaagtaggtttgatggccagccgcaaaatcattccttgctttaaggcccatatcatccagcttcaggtggtccagagcttcaactaaatgtagcgattccagccattggtgcatcgcagctcgccctgcgtctccagttgtcgcgttcgttctcctatcgaaaaatgaatcggtgacgcagttgaagttccccctactacgagcttgacgttgtcggggactggggcgtcgacaagccgctgaaaaaattgcttgcgcgccttgggatcggatggggcatacaaattcattactagtagctcttctccctgcaggatgcacctaatgaactgcctataggcagtccacagatgttggttccaaggttgtgcgttgcgaattgccccgtgcgggttgattaagattgcaacgcctccatgacgagcccgcttgctcctccttccagcatgagcgggtgcccagaaagagacgactgaccgtgaactctgtttgtatccccaccccactttatactgctgctctgcaaaagccgattccacctcatagaaacgatctcctgggttcgagtggcccttagaaatgaactatctagctcacttatgaagtggaaatctacattcagaggtattgacttcgaggagtacaactctacatgtagcacatgctgacattggcgagagtcagctttttattattgctagatcatcgttgtctctcttcaatcggagcacagtacaggctgcgctgcactgagctcccgtagtttgttttgttaatgacttttgctaaactcgctgttacttaccaaacacactgtagctatcctatccttgcgttatctagcaatctggcatagcggctctgtctgtacctcgttttcgagctgtactggttccattcgaaggcgtctcgtaaacctttaaataccctagcagtgaacactgctgcgtatttggacaccaaattaaacagaagcacaaaaacatacagaatatatcgaccacgtattgtattaaaagtacagactagagcgtgagaacgagacgcctgatatatccggatttaaaagggaatcatatgtggcaggcatcactttatgtattttacattgactctaatacctgatctcatcggtaaaaacgggtgttagttgttacccgtctcgtcatcacgctctagtctgtaaatgagaaccagagtccgcatcgagcccccccccccctcagttgagaaggtggccctgagaggaacgctacatctctcatgcggtcagcgtacctaacgtaaattctcaaataataccccttacccgtatagtaccctctacaacgcaacccactgcgtaacccagggttacatggttacttcaatacaaataccaagtatcattttgtgggcttattgtcgaaagcatatttatgcatggaatactgtataatatacgtaaattatcagattttgtttgaaaacgggagggtactaataaatagtgcccggggtattattcggtaatttccgttagtgatccaaatcgaggaattctcctgaagtccccatctacttcaagtatcatattgtcacgcaagctatgtttgctcgacgtgtcttaacgatattaagcatcgtataattttaatagaattgccactatttcaaaaaaatacaaatgctgcaatataaatggcgagagtgatatatcttactgctggtagaaactacggaccccaagatcttgcctagtacagtaggaagaaaatttgtactgtaggttacgagatctttataaaatcgattcgatgttatggcgcagaaccactattgtgaaaaccggcaaagatgtccagaccagattagtttgattaggaggggtagaaaatatataaaaaggggtatgccaaatcctaaatcgtatcgttggtcgtaaaccgtccatgtgcaaatctgagagcctagcttcctgagctacatgaatggccgcagaggtgcactgcatcgtgcagcgagctagagcaagcgtataagcagccactcgtgccaaatttcagccccgtgaatagttcagacgcagacacatattgcatgtacccatcagggtgtttcatgtaaacggcagcgtcgagtttgccgtccacgttgacatggggcaccgttcatataaacgaggtaccctcataatgccaagtgtgacatgggcatttggcgtaatttgattataaatcgacggcagtccacggtacagtatatgatcagggctgggaaacgccaaatcggagtagcatcctatttatatataacaaaacaaagtctcagccgcttaataagcacccaaatcgatcgatttgcaaaaaaataggacatagtgttcggttttcacaatattattctgtacagatcactgatttgagatcaagtcaaatctaatgcattgccatatggaaatgttgatcatttggcgagtccatccagcgcagtgcaccatagccacgggtttattccacgattcgcctcgcgcccgataagcctgtgtaggatacaagaaggatgcgcgtgatcgcggcggttgctgttttattgggcttggtcgtctgcaagaatgctgggtcgactgaagcaatgtcaacggagatgacgctgacgtcaactaccagtagagatgcttgcaggccgcctcagcgaggacaggcgtcttcgaactagtgacgcacttaagaccggagacagcaaggaacgagcgccaaatacttggtttttcaaggcgcgtctcccctggaagaagagtggcagggtagcgtcttcagacgtgaagaaactggatgaggtcggtgctgcccggctgagggcttggcgtgacaattacctcgatagccacttcatcgcgtttaacagcgagcagaaatcagtcgacgacgtatttgcttgggggaagacgcagaaaatgtcagatacagcagcgaggaacgtagtcaaccagtatggtgactggcttgccagaactccgaacctagtggggaagtaacaggttggctgggagtgaaagctacatgttataatgtgctcctttatgccgcagctcaacctcagataattcagctgcttcctcctgatactctcgaacccattcatcagtgtgaaaacatccgaagacgcaaattctttctcgcgaacagttccccttgatgacattacgcagcagtagcataacctcgaatctaccctccgcggcagcgttgctcatggctgcacccgtgcagccttcagttcggtgctcgtctagccacctgataaaagctacgtgtccgccactcgcggctcgatccattgctgctgaggtacagccttcggttcgggtttgatgcagccactttacaacatccagagctccacaagtagcagcaccgtccatcgcagcagcagtgcacccctccgagcggttatgatgcaaccacttgacaacctcgaggtggccaccgcttgcagctccgtccatcgcgccagttgtacagcccacatttacgtgttcatgaagccattaacacatcaagatggccccttcgtgctgcgccatccattgcacttgctgtgcaaccttccgttcgattctcacaaagccagcgtaacatttccaagtgcccattcttcgctgcatgatccatcgcagcggttgtgcagccttctgttcgatgacgatgtagccatttaacgacttcaaggcgattgttttcagccgctccatccatgacagcgagtatgcagccagacatatcgtcatccgagcgctttcgcttaagagtcccagcttccttactcatttcgtggagaaattgcacgatttccaggtgtccatatctcgtggctacatcgatggcactatagcatccccacttggttttcctatcgcaggcccagaggagctgaatgctggagttgatgctaatttcagtgtacagccacttcacaacatcagtgaaccccctcgctgcagcgtttagtatggtctgtcctgatacttctgcggcattgtgatcttcccccagaatctcatccagctcttttaatttcttaccgtgacgataagattctcgggattcctctcggctatttagcggtgcatcaacacgagcatgaagatacttggctatatccaaatgaccgaaaatcgcggctgtgtgaatggcgagacttgctttcctgcccacgttcgtcacatgcgtaggtcgtgtgttttcccgtctgaagtgagcacaacaattgcagtcctcgtcacgttcactgtcgctgtcgctatcaagatatccttcgtcccagtccagctcaactagccagcgaacaatctccatttgcccgccttcagctgcttgtacgagaaggccagttctatcgcccaagtagcttttgtcttctagccactccagcatgtgaagatgtccgttactagcagcacagtgtatgccttcttctttataaggataaacaccacggtccatcaaccattttaccaactcaatattgccacttgctatggcagcacgcatcgtgcccgcgcggtcgatatggaccgagtattgagcaatccaaattgcgacggcattgtggccggcatcagctgcaactgcagcaagctcgtcgccccaacctacatatcgacgccattctccgtcatctgcactttcatctggtccctcttgagactgttgctccacttcagctccgttgtcatcatcgtctcccagcgcaacctcctgaccacggtcagggacgacatcttgcgtgtctacttcgcccccatgctgctcgtcaagactctcttctccatccgactctccactactttcactctcattgctgtggtcaacatcgtcgtcgttgtcatagaaaaattgaagaatctccaaagcgcccgatcttgctgcggcgtccaaagccggaaatgccacgtcgtatctgctgtcgaagtgctcaaacagccacttcaccatgtccagatcattttgccgagccgcctccaccagtgagtacgtgaaccggaattgctgatagtgcggctcgcagtggagcagtcttcgtgtagtgaattccaggtccagcttggtgtcaccgcagcataacccaagctacgatcacccaagtgcgtcagcagcacggattgatgacaatggatgatctcttcgaatgattactcccgacgctgaggtggttacggcgtaaacaggtcgagcagttgcgtggctcgctggactgaagtgtccagtcgagctacatgaggatttagcaggctcaagtgcaagtttattctgtatgtccacttcttcgagcagcagctgccttctagaagcttctagaagctgcttctctcgtttggaggctggtgaggccacgggctggttaccatcagacccagtgcctcacccccttcactttcgattcttcctagcaatacacaaagccctacttccgtgcgggttggcccccgcatcgttgtgtgttgtgttgcttggaacccgggaactactacaaagaattctttagtaggacaccactgcccgagcgcagcctgctacagaccgactgcgccgctcaatgacgtcgaaagcctactacaaccccctctccaagtgcagagacccaagtccctgagcatccggacgtccagcagctgaagatgacgcgctcgacggaaagcgacgggccgaccggttctgtgccactcttcgtccctatcctgccgccgaagatcacgtcgatctcccacgaggcgttggtgaagtggcagcgcgatcggcgcgactacgagaccaagctgtgctcccgctgccgtatctcgggcgaagactacgacatcgtcgccgagtccatcaaggaggcattcgacgaggatctactggaggttttatgcgagctccagctggacacgacccccgccgctgtaaccgacaccattctcctggcagagatcgagcgcattgtcgacagtgtcaagaacgacgcgctgccggatatcaaggagctgctcaagcgcgagctgcgcatgaacatgagcgagagcgacgtgaccgcccgagtgctggactactttatcctgttcaacaagatcaccaaagagaacgggctgacggcgtgcttcagccacgccaacggcgtacgcgagaagtgcaagcgactcgtgtcgcagctcaagccggaggcggtgaagaacgaggtgaagcagtgcatccgcttcacgcacgttccagctgccacggacccaaagctgctgttcaagctggtcgtcgagaaggcaaacgagcacgagcggcggttcatccgcctcaagcagcagaagcgagaacccgctgaacgagaccaagacaagtcgaagaaaacccagccagccaagccgaagaaagactggaacaacaaacggcccgcaaagcagactggggctgttagtgctgaagcgagatctaattggaggcccgcacactccgacaatagccaaaaaccgtccggtcctgctaagccatcaacgaccgggaagccgccgccaggcccgtgcccgaagtgcaagggaatgcattggatccgcgagtgcacggtggcgacggaagacgagaaggtcgagctgatcaagacactgcgcaagaacaagaaggcggagctaaagcgcctcggagaattgctgccaagtgggggccgcacggtgatgctcaacggtgtgctggaagtaccgtactgccctgacagtgggtcggactttacagtcattgggcggtcgcactgggagcaattgcgtgctctcgatccaattatcacagtcgaagaactatctgtccccgtggagaaccagacgtttgactccacggtggtgacggcccgcctgaaggccaagctacacgtaatgatccacagagcagtcggccctgttgaacctatgagcatggcgacgtgttggtggtggatgtcgacgatggtgagttaatcgttggaaataacctcctactatcgctcggcattaatgttgatcaccagctggagcagctggcctcgcgtgatgaagatgaactaagtggagatccgatcaatttggaggcagatgaaatgcctgttggcgccgatggatccccgccaagtgatgatgacgacatttttgctgcagtggaacgattgattgaccgcgccgtggagaacggatttccgctggagcatgtggagcagctgtgcaagatcgcgcacgcgtacgatgtgtggcgcctcgagttgcgtgctgacccaccggcaaacgtgccgcccctggaagtgcgtctgcagagcggggctcgcccagctaagtgactggtgtacgagaaccccaagagccgctggtcgagccccgttttgccagtcaagaaatcggccgacctcatggacctccgccagactaccgactaccgagcagtcaactcgctgacgatcgccatggcggcggtgatgcctattctttcgttagttctggaaaacgcccgaggaatgaagcactttggtctttttgatttcctcaagggtttctggcagttgccgcttgcagagctctgccaagcgtttttctcctatttgactgacatgaagactttcacgccgcgtcgagtgccgcaaagaagcagtgacgctgccattcacttcaagaagacaatggaggagtgtttctcaaccttactctacgagcaccttctgatctggattgacgacctgctattgtacgctgcggacatcgagacctacttgattaagctggcggagctgttctcactgctcaaccagtttggcctcaagttgagtgctaagaaatgcagtttgtaccagaccaaggtgaagtggtgtggtcgcgttattgatcaccaaggtgtgcggcatgataccgagcgcattgatactctgcgagcactcccgtacccgtgtactgctgcggagctgcagcagtttgtctgcgccatcaattggatgcgcgagagtatcgtcgatttcgcgcgccaagtcgcacacctgcagcgccgattggatgcagcacgtgccgacactaaacgaacaagacgtgctgccgcaggtattgagatcgatttgactgaataagagcgccgggtgtatgatcacgtgaaggagctgcttgcaacgtccgccacgctcgacttccctgatgacaacgcgaccacgtgcctgttttcagacgcatcggacgtcggttggtcgttgatcgtgacccaagttgcggcgtttgactcttccaagcctgccacggaacagcaacaccgcttgatccactgcatgagcgggacgttcacgggcagccaactaaactggtcaattatcgagaacgaagcactaccaatagtcattgcgtgcgagaagctggactacttgcttctccgcccaaaacccttcaggatgtagtgcgatcataggaacctgattcacgtcttcgccccacacgaaagcgtgaaaaagcatatcaagggcaagcttctaagatgggcgatgaagctgatgaactttcgatacgtcgtagagcatgtgcctggaccagataatgtgtgggcagacatgatttctcgttgggctgggaaccatgtgcccgctgtttccgtcaaacggataaaagcagtacggcgacaacaaggggccgagcgacacgcgtcgcccttgctaaggcctctcgatgacgacggcttcatttggcctacgctggaggagctgcgcgagttccaagcgaagttttcacctccaccaaaggccgagcgcggtgagaatagcgtcataacgcttgggcaccgcatctgggtgccgcgtgaagctacggatttgatccagcgactgtgcgtcgtggcgcactgcggagcccaaggccatcggggacaacaagcaatgatagtctacctgaatcgactgtttgcaattgatcgtctgacgaagacggtggcaacttttgtgagtggatgttcgttgtgtctacactctcacggaggcaagataatcccgaggccatggggtcagcagattgactgcagtacacggaacgccgtgttacattttgatttcatatacctgggaccgagttatggtgcgagcaagtaccttttggtcctgaaagaccacgcaacccattactgtgagctgatagtcgcggatacacctgagagtcacgtcgtggtggacgcgttgttggattggcacccgcggtttggagttccacctgactggatatccgaccaaggatcacacttcaagtgtgaggtagtcgccgagctctgacgccgcctccgctcccagccgtcgttcacacctgcgtacagtccgtgggtgaacggttcaattgaacgaatcaatcgcgacattcttcaagtcattcgtgccatgatactcgagtacaaggtaagctacaaggactgggtgtacctggtgccgatgatccagtcaaatctcaaccattctgctgtgccttcgctcggaaatcgcgctccagtagagctgttcacgggtctcgagtgcccgactccattgaaggagttttatctacctgacaagaacgacctgcaagaaattcctgcaagtgatgaaattgatgcgttcctggacacacttcgcgcgagtatccagaacatgcacaacgccgtcgccgacaaaaaggaaaaacaacgtctcctcaacaaacggcgagaacgaggcgaaaatatggtgaatttcgcgcccggagactacgtgctgcgttccagagtcgacgagaagcaccgcaacaaattgcaggtgacgtgggttggcccttatatggtggtgcgagctgataagcattcgtttggcgtataacatctcatcacaggtgaagagctggacgtgcatccctccaggctcaagttttatgcggacgacagcctgaacgtttccgaggagttgctggagcacgtggcatcgcaaggcatcgtgatcgcggcggattaactcaaaggccaccgctggaacgaaaacatcgaggactacgagattttggtcgggtggaaaggtttccaggccatagaagactcctacgagccgctgagtgatgtggctaaggagattcgtgttttggtgaacaactatgtactgcatgctgaggaccaggcgctcgcggagcattggcaaaagctgcacgggaacacaaggcagagcgccgacgggcaacctgtagttcccggcgctacgtcgaccggtgaatcgcgtgtgccaccaggcaacgcgggacaggcaaggcgccgactatccgggaacaagcggcgaaaacgtgatggaggtgctggtcgcagtgctccacaatctgataatggcgatcgagctggagcaaggcctcttgctgcgagcaaaaaaggcaagcgtccgaagacaagagtcgcagaggctggacagcctccaagtggcggtcaacgacgttctcgccgttcaaatcgctctcgtaaggaccatgaccagcacgactagctttcttgcggagaactgcagtcgctgtcggcgatcgagatgatatgagtggtgacacaagcttcgggggtagtgtagtgaattccaggtccagcttggtgtcaccgcagcataacccaagctacgatcacccaagtgcgtcagcagcacggattgatgacaatggatgatctcttcgaatgattactcccgacgctgaggtggttacggcgtaaacaggtcgagcagttgcgtggctcgctggactgaagtgtccagtcgggctacatgaggatttagtaggctcaagtgcaagtttattctgtatgtccacttctccgagcagcagctgccttctagaagcttctagaagctgcttctctcgtttggaggctggtgaggccacgggctggttaccatcagacccagtgcctcacccccttcactttcgattcttcctagcaatacacaaagccctacttccgtgcgggttgggccccgcatcgttgtgtgttgtgttgcttgaaacccgggaaatactacacttcgtatcgaccacttggagtcttcgtattcgtggcggttaccgacacttgtccaaattcgctccaagagcgcaagggacccaaaacggctcgctttggcgagtgggagctcgacggaagagtatgcgaacccagacacgcagtccagcgcgtgaggcagcgcgccgaattcctccttcgagcggaatagcagctcgacgatgagcagtggctagagtcgaccatgtgcgtccattcttggttggggaaatacttccgtacgtacaccaaatgcatgacaatctacatacggtttttgacgctgaagttattatcgtatttacggtatcaggtacggtactcgatcgacacggatcatttggcgccaaagagggcgggcggggcgcgagaatgcgccgccagccgacagcaccaagcgtgtctgcaagactaactctaccaagcccagcaagacgcacccccacccaacagccaacagggcagcgtgaagaaaaccagggccccagttccctcgaagtacgaaaagctacatggcgccaatttcccagtggagatcgtggccttgccccatgtgcttcagagaatcgacgacctcgccatgaggccggaggaggccgtgattgaggccgccaaggctcgagaccggaaaaatgctcaagaaactcaccaagaaattaaattgtaatgtctccgacgcgcttaaatttgcagctggcaacgggcgacacgaacctgtgcggtcccttcttccggaggtcattggggacggagagtacactctggacgacgaagtccttggcatcttggagagcatggcgatcaccgccgctgagaacgaccactacgaggttgtgcagctgctgctgggtgaaatcatggaggagagagaggacgaacacgaaggcgagtttgtgtattatggctacgaacgagacatcgaagagggcaagagcgacgcagcctgaaatgttcttgatgccgcagcgagaaatggacacgtcgatatcgtggagctggcggcggagtctgtatctgacgacgacaacttgcctgctagtgaacggagtgaggcgttgtctagcgcaaattctggcggacatgctgctgttgtggagttcctggtggaatgcgagcagtttcagtggtgtgtgttgggtgcttttgatcaagcggtcagcgagaaccaacaggagatcgccagggtaatttatgacgtgtacccgcgttgcaacaagggtgcggacctgttcgtcgacttggccggtgctggatacttggaagccgtgacgtacttgtacgataacgggttctgctcgtcagggtcgattggggacgcttttgtaagcactatatgctcaacacgaattactgtcgcaaacttcttggtcggcacggattcggtatccgctacggcgtttaatatggcattcaagaaggcagttctgggtggacgaatcaaatcaacggaattccttttcagtacagggcgtgtgcctccacagaccgtcaacactgttttcccaaaggttaccaagatcaatatgatgaagctactcgctacgaaacagccagtctcctcgaaggctatcgtgaccgcattccgcaatgcaacatgtcaagggcgtttcgggtggggtactgataccgaagcaatcttgcgtgaattgtgtaagacgaactgtatcccatcagaggtctatggagagggttttatgacagcagtgaacaccagatacggcggggatgcgatgggcaaggtcttgtatgacgaatcgcggatttcggaggaggtcattcaaacagcattcaagacagctgccgatattggccatagcgagatggtcaggttcctattcgacaagccagctttacgccaagcggtcaagcacgacggatttgtgagtgcggctcaacacaaccaagtcgaggtcgtacagctgctggcaagaagcgcgcaatggtcgcaagatgcgttgaccagtgcattccaggccaccaaaaaccaggcactgcggaggtttcttcgaacaaaacttggcatcaagtgagcggaagattgctcgcgccaaagcatctccaagcgtactacatagtggaggcacattgacgacttcttttatttctttcacgtgtgtaatcctgtgaatacacgatgtatagcaaagcccaactcgtattcgttgttttccaagaactaacacaaagacgtcttctctcgtaacactactggggtctgtaggccccctagctcgctactgcggcgtctcggtgtccccctcaagagaagtttggcctgtaccgaccaaaaagctcacgacagaggggcagttgttggcggttgcttgggtatgagccttgcttatcagttgcgagtcaatatgccctctggaatgcatatactcgactgcatctctgcgtcccctccccgccatttccacaaacaagttttctccctcatccagctccgaatagagctcataaatgcgttcagcaacttcgtgctgctccttattcatcgcctccacaaacgcgctgccaaagtcgcaatgaaaatcctccaaaccgagcagaaacgtcaccacttcagcatgcccaccgtcgattgcctttatcagtgcaggagtgcactcccgatcaaactcttcggacgaaatcaattgctcagctgtaagtttcacaatatcgaggtatccgcgtgcagcgcccacgtggaatgccgcccaaaacaactcttcattgatctctccgtcgcactccagcgcatagagcaggaagtctaccacctctgcgtggccatttctagcggcggggatcacagcctctgagattaattctcgtcctggaatatcgaggagtttctcgtcgtcatcgggttcgcatagcgcgtctcgaagcagcacgacgcagtcgtagtggccattagcagctgcagccatcatggcttccgtcaagttatcctcgaacgtctgcagaagttcctccagtcgggtagcatcccctgctgctgcggcttgaacgatggcttcgcatgggggaggaggggcgaggtcggcgtccactgtggtgcgagggcgcttgacgtcctcgtcgtcgctggtgaggtcaatgacggtcggccgagctcgcttgctattaggggtcgcggccatcgcctttcggaatattttttttgttctgggcgccctttcggggttatttatttttgcaaaaataggtaataccttttgtgctgatatgttatgcatacagagagtggcggcaataagaaagggtcaacagcttataatttcgacaacacatatctattgaattatacagggcctctattaaggtactgagtttgtcaaagtgatgtggcatacacacagcagtagaagttcccgcgcatttttcaaaatccaaggatgactccgtgcagacgaagtggtcagccactgcgtgggcatcaacggccgttgcgctccagcgccccagtgctcccgtcacacctactttctcgtccccattgccccgcaaactgccgctaaggaagatcatgagcgcctgcaggttgatgccggggtgttgtccactgcacatgttgggtttgcacaagctcagcgaaatgaaacacaccgccgagacgtagctacagtaatgtgcggtggccatggacatgcagggcgtcgtggtgagtcgcagccagttcatttgaaggtcgtgcgcctcaggaagacgagtacgacgacgatgcctagcgtcgaagtccatcgtcgatcgggccaagtaataacgtacctaatgtgtttcatttatttcgttaagtcaatacgtttaaagctccgtaagattttatttgacttgattattgtatataccttcaatactttaatcgttgaaccctttcttattgccgctactctgtattttcggatgtagcacaatggattgggaatgcaaggaagtgtgtatagtgtagtaagcaggacgctttttcagccccgacagactggcgaagtggactttacaccagggcgagaaggacaatgaagcggagacatgcaccttaacagcggacccggagcgactttacaagcgagccaaggctcggtcatgtggcagcggcggcagccagaacagcgtaacggacaagggcgcgaggtgaccaagcggcgacgacacggaaagatcgcagcagcagccagcaggatgactacagaaggggtgagcagcacgactctgagtgcaggctaccatgacatccggcaaggggtggcaattgtgtggctgagccgtgctggcaagcgtcgctgtcgaagatcgcccgcccaaacgccgcgctcaacagagaacaaggccggcgagtcgagcagagggcgctcagtctaagatctgcggagttgacggcaagtcgaagacgcacaagagcgcgagctgccgagctagcgcccagcaagacattgcgccggtctggtgtagtgtcagaaacacgctaagaagaaatacacttgcgttacctgagccacatctacttgagccaactagaggaggactagtgaagaagccactgtcgaagcaagtcgcgttacagcaactgcagcagaagcggaggtcggctgaagcaagccagagtcgccgaactactggtgacctgcatcgacaggccccacggaagaagaccgtcggaagggagaacacgaaggctgtgcgtgcacgtgggcacggtctacacaagtgatcgctccagccagctatagcctctctgggcctaaagaagaagcaaagggtcgagagcacgtgcaatcagtacctgggacgatttcggcgatagtaaagctttatctacccagtagatattgtacattgcatcagtagttgagctgtcgccgttagccaccggagacctcggagctgtagtgacgagatccgggcaaggtacaggtggtacgagaatccagctcggatcacgccaggaacaagaccggaagagctgagtctggcggtcacgtgcactgcgtcacaagttgctgatgaggcctgtgtagggtgtgttttgggtggactcgaccactgtgtgtgagccacacggctgagatgccgtgtgctctctggtcgacggaacgctggcgtggcttccaaaccgaaggctgcaatacaggatcttgcagagcagccaatccggttagtccatgggggttttgtagccaaaggctttcctccggagttcacagtcacagaagctcaataaaacacgatcgcctctggtggtcactttgcgatttgcatcttgccacacaagtcatctctcctacctacttgcagtctcctacgctaatctcctaagtgctcaagagccgactcctcgaaactcttaggtggtagctggaaagcaggggtaccttactgtgtgcttgtgctaaccacttagtggcaagttttgttttagaagttcggaagtcaatcggacgtaaacacattatgaaatttgcgatcaagttggtggtctgctggcgcgacgtacaagatggaataccacagaggcatcgatctctctttgtttgtctgttgctagaatcatttgccgcgtatcgtccgtggattactgggattcccaacgaggaaaaaatattcctcatgaaacaaagcgcccgaatcttggcatcgctatcagctttgtagcttggttcgaagactgagacgccttggccgtcgtcatcatcatcatcatcactatcctcgtagtcgctctcctcttttggaggactttgaaacttgtcaaggaaaaatacacacagtcgtccattcactcgccgacgtttcaacgcaatcaagacgccatcacgcgttcgcggcccagtaaagtggttcgctcccgtcaacattgctaggatgagcgcatacgtgtacagccacggttggtatagaatatccgacacgaaagcgctgtcgacctccagcatatcgctctccacacaacgcatgaacgcagcagagcggaggcagttcgggtttcgcttaagcgagggttctccgcagatgatgtagaacaagtcaagttccttacgagccatcaaattgtaagccatttgcgatttctccgtttcagtggaacaaacgagaacaatgcaaggtgttttgggcgcaccatgtttgctcaatctcccaatagttgcaacaagctcgtccacaacatggagtttcttcatcaacctgattctctctaacccaaatgcactgagagcaggatcgttctttctcattccaatcataacatccgctacacagtctgaagactgggccaccacgcgaaatgagggcacattactctggaagatcagacactccaactccaccttcgatactagaagatcaatccatccatcagtcacagtcaaatcgaagcctgattgacaaaatacgagtcttttttattttcttgctagatgtatttggattatacctggagtgagtgagagagagagattcagacattcaacctcccgtagttgtcagtccaacttttcgtggccgatgacttcgcgcgaaaaaaactaagtgtgtatgcccaagctcgaagtaagcggaatcaacacgaaggatcgtggggaggtttcaagactgggtgaaatgttcagcccactatccccgactcgagaatagccgctttccagctgaaatctgcgcccggcgagtttgatcctctctgcggagttgcgtgggaagttctcgacacagccgcaggcagtggacatctagacattgtggagtttgcacacgatattgccctatgtgaagagtacagcgaacccgaggatatctcaagtgaggcgctgttcaatgcaatccgggggcgccatatttctgtcgtgaactttctattttctcactcagagaatgtttgggacctcagaagggcgtagtcgcaaaaggcttattatttgttgcaacgccaatttctaaggcctatctcgcgaacaattctgagtcgatagaaaatttgcttgttaaactggcggagctcgggtacctacacagcgtgtcgtacttgtacaatcaaggccactatggcccggaaacgatcggcgacgcctttgtcggtgtcgcgatatgcgataacgattgatgtacttgagtttttactgtcaactgggcgagttgcatctagcgcgttcgacaaaggctttgagatagcggcaagtcgcggatctgccgaagcgacgctacgtttatacagtgaacagcgtgctaccgtcgcatcggtcaggcgcgccttcgaaagcgcaggcagcgtcactatctccagatttctgtatgagcaggagaagtttccggctgaatctgtggttgctgcattccaagattcagctcgccaaggacgtcgcctttggtacgtgagcgaggaggaacgcatccgcatcatgaggtttttgtgcactagaactcatatcccagtcgaactgattgtcgaaaaatatttttttcaaaaatttattttcgaggattagtacagaccaatgtggatttagtccacagcaaacatctaagttccatactccatgggctcgctacgaatagcagctgcgacagacagcgcacagtgtcgcgccatcttgttaacaaggcgcatgtcaatgcaaggcatgcagtgctccgcggctttctcgagcagtcgcattctgcgctccgtcttctggccgtgcggcacgttgatcatctcatcgtggctcaatcccagatacgccttgaagcgagcttataaaacgctaaagcaacctgcacaataatacattgtatcgcctcagtacctctaagtatatcgcaccaaaagataagctaaccgtaccttcgatcgggttacacataggcgagtacggccctaggcgtagctactccagatccgcccgctgttggacgagatcctccgtctggcagtgggcaggcgcattgtccaggacgatgacgatggtcttgccgagaaagtggtcgcggtacacgtcgcgggccttgaccgcgtcgtatacctcgtccacaaactcggcattgacctccatcttgatgctgccacgacgcgtggcgtagtgcacgagaccgacttcgggggaaactgcgcactgcacctgtaagttagcccccttagagggagggagcttgacgatagcgcgttgtccgacaggagcgcggccttgcgccgcttacagtacaggttgtagttggtctcgtcataatacacgataaaagcaccgttccgctcatgcttcagcaacgcttcaccaaacacccatcctcttctcgatatttacagcattattgcaggtctcgggctctacgcgaacctatcacagggaacatacttagtagagtagatggtaaaagtgatagcataataacttgaaggcgtacctgcttaacagtgtaaagcttatcgcaaagcttcttactgatcaacgaagtgctgatgtgcaccctgaagtcgaacgcaagcatttcctgcatctgcacgagtgtgtactggcagttgtcttccaggtagcacacgacagcttcctccatttctggagtacacttcgtgcacgccgcccgcgcgccgcctctcttcttgacatcagcggcttggcgctggacgatgttgcgggcagtagtgggagggatgccgttgcagtcggcaaccagcacccagtcacgcccttctcggtgtgcatcgagcgcacgcttgcgggccgcaagcccatgcttcggctcttggggcatgttgccggcggagacagtctgttactgaccagtgatttgagtttgctctgcactaaatccacattgctctaaatactaatttcagaaattattttccgatttttggatgggtacttaagttacttcacaccgttttgtcttacactgctgccaacttggattggcaaaggtgtagtcaagacggatttgtgtggtgaggacgctatctccaagttatggaacctttgtgaaaaggctgaagatcaggccgacagccaccagtaacaagtagtacacaatggaaggctcgttgtgattcagtattttataactaattgttgtgttttactataagtttttacttctatgttgtttatattgagcgtgcttaataatttcaggcgcttttcgatacgatcgaaagaatgaaatcaatgaatttgataaaccacgaggaagctacgtaagaggaggtggataaataatttttctgtgaaggcaggcgactcactcacctgaaaccaagaaaactacactgaagtacgcaattacaagatcggaactttgtttttcactacgcttgccagcggaaattctagttaaaacacctgttcactagcgacacaaagctatacgatgcttagtacacacgaaaggctggaaccgtaatgactcatttcggcgaaaataaatcttaaggacacggaaaaacgctagactggatgtctatcccttgcacttcaacatcgatgccctcagttgtcatttcgccggtccaagcacagagccatgggcaagccaaagaatccccacccgacggacatcgtgaagcggaccgacactcaagccatccaccttccgcacgttcacctcgaggccgtcacgcaagttgtcaccaaaccgactccaccgtccccaatttcggcgattgtccaagctgcagcgactgggaacatttcgtggctctggaagttactgcaagcctttaacggggacatggcagacgctgtcgcggcggcagcgtccaacggccactgcgactgcgtcgctctgcttcagagttacctcatcaactttgatgccccgaaggcccggcaggttatgagggaggggatggcgcctgccgccgccaatggccacatcggtatcgtgctgttccttctcaagggcgtggctcctgacgacgaagtggatggcgacgcagtctggatcgcgttgctcgaggccgctgctaacgggttcgtcgagattttggagcttacagcgagttatgtgtcgccacgggacgcgaacttcgagctcaacgtcgcgagggcgatgtcgaacgcgatatcgggcgggttcatcgacgtggtggtgtttctcttgacttgggagaagtgggacgccgactttgccaagacattcgagaaggccatggccaccgagcagcacgcggtggcgaagaagatttacgaaatctattcgcgagtgaaggtgggagggaacttgctggttgatatggcggcacgtgggaggttggacgccgtgaagtacctgtacgaccgaggttgcacgtccaagctttccagcacgccgacaccagcaaggccacgccggttgtcacgttcttgagagctgccattgcaggcatctgcggcagcaattcgggatgaggcagtcgcttagtttttcctcgccgttgtggagggccctcaacgcggtgtcagtaataattacctgcattagcatggcgtagtgagaatgaggcacggagggcggctgcggggtttattaagaaaaaatagcaaagatgttcgttgagtttttccagaagaaatcgcttgagaacttgacgccttgtggccttgtaagctctagtcagaacatctttgggccattctccacatcttcctaactgctggacgatctccacttggtcattttgagtggcactcaccatggcttcgtgcttgatcgcttgagttaacgctggcttgtcgaataaaatctctaccatcttggtgtgaccagtatccgccgctgtcttgaatgcggtacgaattacttccgctgagatgcgcgattcatcgtacaagagcatggccatcgcatccccaccataactctctttcaccgcggccatgaaaccacgtctgatgggatgcagctttgcttgtacaagaagcgcaaaatggcttcagtgtctgttttccagccgaagtatccttttgaagtggcattgcgaaatgctgccacgaccgctttcgttgtgataggctgtttcttagcgagaagcttcagcactttgatcttcgtcacttttccaaagactttgttgaccaattgtggtgaggcacgtcccttgctgaataggaactccattgaatcaatccatccctcaagggctgctcttttaaaggccttgccaaaagctgctgcagataccaagtcggtatcgagcaagaagttggcgacagcggtataattaggagtcatggtgcttgcaaaagcctctccaaccgactccgacgtgcagaacccgttatcgtacaagaacttgacagctcccaagtatccagcaccagccaagtggatgaacaagtctgcgccattgttgcaccgcggatacacgtcgtaaattaccttcgcgatctcgtgttggtcctcattggccgcttggtcaaaggcccccaactcatcccactgaaactggtcgcattccagaaggaactccacaacagcagcatgtccgccagaaatgcgttagtcaacgcttcactcagctcactggcaggcatgtactcgtcctctgtagcacaccccgccgctagctccacgatatcgacgtgtccagcttccgccgctgcatccagaacgtgccatgcggcggaattcttgttatcttcgatgtctcgttcgtagccataatacacaaactcgccttcgtgttcatcctctctctccgctagaatttcagtcaagagcaggcccacaacctggtagtggccgttgccggcagcagtcacagccatgctctccaagtcactcagcacccgatcttccagattgtatccgtcgtccccaatgacctccggaagaaggaaccgcacagcatcgtgccgccccttgccagctgcaaatttaagcgcgtcggagacattacaatttaatttcttggtgagtttcttgagcttttttccggtctcgagccttggcggcctcaatcacggcctcctccggcctcatggcgaggtcgtcgattctctgaagcacatggggcaaggccacgatctccactgggaaagtggcgccatgtagcttttcgtacttcgagggaactggggcccttgttttcttcacgctgccctgttggctgttggtctgggggtgcgtcttgctgggcttggtagagttagtcttgcagacacgcttggtggtgttggctggcggcgtattctcgcgccccgcccgcttcagggatcgagtggtcacagccatttttcccttttggcgcgaaaggatcgtgctcgcaggatggtggtgaatacgatagctttctcaacctgctacgagcgaacaaatacaattgaagataaacgcaagtttgataaagctcttgctcaatgtagtggcgggagcttgacctcagatagagagcagtggaacaagggtgttgaaatggtttcatgtcatttcgattcatcggaagcaagctaaccgtgaattctttgaggtggctactgtagtgtgtggggaaacattagcccaccaacgtaattgcgtctgcagaggacagaatgtaaatgccaagcaaaacgagtgcgatcggaacgatgtaatcgccgtgtttttcaataaactgcaccacgatgcggaacgagacgaaactccccgcagcgtaaatccatgcgaccacaagtgcgtagaaaacacccacagtcagagctatatcgccgacaccgtaggccactaagccaggaacgtacaccgccacgttgtcccctccgttaccgagtgccacagctgctatcatcaacgattcagccgtaagaaatgagcacgcccccctatcggatcccaacactcgaagcacaatcctcgtccaagatagctcttcttcaatatcaatcacgttagacgtggaagtcattgcttgatctcctcctttagagcctggtgtagccttcgtagtcgcgaagaaagtctgcaattggtcactccgtgactctatcgcgcaatctactccactatcgtgatctcctttcccctgtggctgcaaattcgcatttctcacagtcaaaggtggcactgaattttgttggtggtggctgctttcgccttctttaagagtgtcattaaccgtcttccaccactcccgcattcgcttcagccccatccatagaggcacaacgcccaagagccctgagtagcgaggctgcagctgtgacccgataactccaaagagactcaccgccatgataatggagaaccctagaagctgcccgaaccaaacgtcttgagcccggagtccgcctctaccttcggcagcattagcgaagtaaacgatcaaaacaagcgcgtcgtcaatattggtgctcacaaacatcataaccgccgacgagatcacgccccaggcccccatcttcttgtacgtgtagcggttgtgaatgtgaactgcgacagcggactaataatatctcggaagtcggtctagagaaatgaattaaacttgatttaggcagacttacactaagcttagtacatcggcagaccacaaaatgtagataccgagaaacacaagggcgacaggaatgaggtaatcgccatacttctcaataaactcggccacgaagcggaagggtacgaacgccgcggctgcatacaaccacagagccagcagcacgtagaaaatcgcgactgtcagcacgatctcgccagcatcatacgtcacgagacccggaatataaacggcaacgttgtcgcctccattcgcaagcgtcacagccaccagcttcatcgaatggacactgaaaacggacgatcaccacggactgtgagtctttttctccaaactcactccgggtaaaccctcttcgacatcttctacgccacccgacggagtaagcacttacaatcaggatggtcttgacagcacttcagcgtctccacatttcgctctctggatgatgagctctcttgggcttttggggtcacttcgtgtagctgataattaccaatgggctcattgatggaggcgatgttgatcttcattagagcttgcccgctggttctttcttctcggacactgctctccgtcgaattgcaacgaggatcaatagaattgtggtctccactgctttctttgtccttcttgcaccagtctttcatccgccacaggcccatcagcagcggcacgaaacccaggagtccagagtagtgaggaggtagaaaagacccgacgaacgtcccgacgaagctgaggaccatgatgatggagaacccgagaaactgttcgatccagacgtgccgcggttggagaccgtctttgccctccgcagcgttggcgaagtactcgacgaggacaagggcatcatcgatgttggtgctggcgaacatgccgaggcgacgactcccaggagacccatctcttaccagcagtttcccagtgttgggtcaaaaggcttcatgcagatgtttgatgtggtgcacgttacttacatattggcatggcatacgcaatttgtttagctttcctgcgtatacatgtatcactactgaacagtaattcatgattcgtacaagcaacacgcagcatgaaacggcagtaggtgacaatacaacccatgcagaggcttatcatcatttttggctgcaccaatgcaagtcaccagcgtgggttgcatacgaatgtgacccatgttcctgttgtcttcatttgtagccttgaataatgtgttcctgttaaaggcgttcctaccagcaagcttcacatccaaatatatccatctcaacagaatgaatcacatctagagcacccgcgcagttacacaggtaggcaagcatacccaaagagggagttgccattcaacctccattccgaaaaccctagatcgttctgacaaaactttgagtcatttcattgtggcgtaatagcgaagctcgataatcaagctgtgacaccaaatccagcagtccctcttgtacggtacgtacatgtactgtagtggcgtaagcgtgatgtggttagcggccgcgtaaactttcagttcccgctgcagcccagttgccaccgcagcgaggtagccagacgacacgttgacaactcgcgctggcagagacgtcctgttttaatgctgtaatagcagtttgcatacttacacgaatcataccggggtacaagaaaaataaggcatgctactggttatctaacagtaaagttgcgccagcctccatcaaggccagattggggctccgtaccgtagccgtagcaccaccacctgtttgggattaccgcagtcacatcgaaagggggcaacgcaaaattgcacgcttttcaatgttgtctgcgaggttgcaggcttcgaccatgtttaacgtgcgtcttgcactgctcggaggctgcagctcgaacgttcacactcagcagcaagggatgtcgtgccttaagccgcacacaatctttgctgcctcgagcgtcggatggctatactcagatgtcaatcgcacgattagcgcggcgctgtcggcaatcgcgacttgattatcgtggcgaaactgccacaatcgcattccattccattccccccttcgcgtcggtactgtaaaactctggagctcatttccaaactggttcgctgatcaccagccgatccaagtacttcacactgcacagtaaccggtcgtcttcgttcagcgaaaagttgctcgcgatgtcgccctcggtcgacaaatcggggcaagcagctctccactcggacgtggagcacggcacgacgaccaaacaggttggtctggactccggcaaggctctgctggccaatggacccgctgcaatgcacgacttcgtggcgtctcgactggagaccgcattgggcggtgagctcccgcagatggaggtgcgcttcaccgacctgtcggtgtcggccgacatcacggttgtcgaggacgatggcagctccagcgacctccccacgctctggaacacggtccggaagtcggtcgcaggcatcggccgcaagaagcagattgtgcacaaggacgtcctcaagaacgtgacgggcgtcttccgaccgggaacgatgacgctggtgctgggtcagcccggctccggcaagtcgtcgctcatgaaggtgctgagcggccggttccccatggccaagaacgtggccatctcgggtgacatgacctacaacggcctgacccaagcggagatcaagaagcaactgccccagttcgtgtcatacgtgccgcagcacgacaaacacttccccacactcacggtgcgtgagacgctcgagtacgcgcaccagttctgcggtggcgagctcaaacgccgagccggagaactgctgacgcagggcaagcctgatgagaacgccgaggcgcaggcggtggccaaggcggtgttcgaccactacccggaggtcgtcgtgaaccagcttggcctggccaactgccaggacacgaccgtcggcgacgctctccttcgcggtgtctcgggcggtgaacacaagcgcgtgacgacgggcgagatggagttcggcatgaagtacatgacgctcatggacgagatcagcacgggtctcgacagtgccgccaccttcgacatcatcagcacgcagcgcagtattgctcatcgctaccacaagacggtggtgatcgcactgctccagccggcgcctgaggtcgtggcgcttttcgacgacctgatgatcctcaacgccggcgaggtcatgtatcatggccccatgagcgaggtggtgccgtactttgctggcttgggcttcgagtgcccccagggacgcgacgtggccgactacctcatggacctgggcaccaagcagcagacgcagtacgaagtgcagctaccggtccccaacctcgtgcaccctcgggagcctagtgacttcgctcgcgtcttccgcgagtctcacatctaccagaacacgctgaagatgcaggccaagccaaccagcgacaagttggtggagtacgcgcagaagcacatgaagcctatgcccgagttccaccagtccttccaagcgagtgcgttgacgctgctgcgtcgtcagatgttcatcatcggacgcaacaagccgtacattttcggccgagctctcatgatcacggtcatgggcttgctgtacgccaccaccttctaccagttcgacccgacggagatccaggtcgtcatgggcatcatcttcgccggcactctgttcctgtcgctgggccaggcttcgcagttgccgaccttcatggcggcccgtgagatcttctacaagcagcgaggctccaacttcttccgcaccgccagctacgttgtggctaactccgtcagccaacagccgctttgcatcaccgagactctcatcttcggcacgctcgtgtactggatgtgcggcttcgtgtcggagatcctcgagttcctgctgttcctgctggtactgttcatgaccaacttcggactgggcccctttttcttcgtcctcacggcggcggccccggacatcaacatcgcgactcccatttccatggcctcgacgctcatcttcattattttcgcgggattcataatcaccgagagccaaattccgagctacttcatctggttgtactggctgactccggtctcttggacgctgcgtgctctcgccattatcgagtaccgctcttcggctctggacgtgtgcgagtacggcggggtggactactgcaccacggaaggcgtcacgatgggcgagtactacctgcagttgttcgacctcaagacggagaagagatggatcttctactgcatcatctacatggccgcctgctacgtgacttgcatgacgctcggatacttggcactggagtacaagcgctacgagacgcccgagaacgtcggtgtgtctgccaaatccactgacgatgaaggcgactaccgacttgctagcacccccacggccagtaacgcgtccaagtcccaaaccacgagcgaagtgatgctggatgtggcggcgcgtgacaagtttcacccccgtgacggttgcgttcaagaatctgcgttactcggtgcctaagccgtcaaaccccaaggagtcaattgagcttctcaagggtatcagcggctttgctcttctaggcaagatgacggctctgatgggcgcctccggtgctggtaagacgacgctgatggacgtgattgcgaaccgcaagactggcggcacgatctcgggccaaattctgctgaacgggtacgaggccaacgagttggctatccgtcgctgcacgggctactgtgagcaaatggatattcgctcggaggcgtcgacgattcgtgaggctctcaccttcagcgcgttcctgcgtcaggacagcagcgtccccgacagtgtgaagtacgactccgtcgaggagtgcctgactctgctggatatgcacgacatcgccgaccagattatccgcggcagctcgaccgagcagacgaagcgcttgaccattggcgtggagcttgcggcacaaccgagtgtgttgttcctggacgagcctaccagtggcttggatgctcgctcggccaaggtcattatggacggtgttcgcaaggtcgcggattccgggcgaaccattgtctgcaccatccaccagccgtcctccgaggtgtttttcctgttcgacagcctgctgctgctcaagcgtggcggtgagactgtgttcttcggtgagctgggacacaagtgcaagcacctcgtcgactacttcgaggctcgcctggaatttcaccgttgccgccgaagtacaaccctgccacttggatgctcgagtgtattggcgctggtgtgtcgaacaattcggctgatggcatggacgttgtgtcggcgtttgaggctagcgagcagaagcagaagctggagcacactctgtcgcacgcaggaatctgtttgccttcaccggatatccccgagctggtattcgccaagaagcgagcggcttcctccatgacgcagatgcacttcctcaccaagcgcttcctggacatgtactggcgctcgcccacgtacaacctcactcgcgtcggcatgtctgttttcctcgccttgctcttcggcgtgaccttcacccaggcggagtacgagacgtaccagggcctgaactcgggcatgggcatgctcttcatgtcaacgctgttcaacggcatgatctcgttccagtgcgtgatgtccgtggctgctgccgatcgcccagctttctatcgtgagcgctcttgccagacctatcatgctttctggtacttcgtcggctcaacgatcgtggagattccctacgtgttcggcggcactctggtgtacacggcgattttcttcccattggtgcagttcacgggcttttacaccttcgtcatgtactggatcaacacgtcgctgctgatcctcatgctcacgtacatgggtcaaatgttcgtgtacttgctgccgagcgaggaagtggcggggatcattggagtgctgatcaactcggtcttcttcctcttcatgggcttctcaccgccggcgaacctgattccgcaaggctacaagtcatcacacctcagcgattctccctcgtgatcctcggcgccctcgtgttcgccgactgccccgacgagcccgtgtacgacgaagcgaccaagacttggagcggtgttggctcagagcttggctgccagcccctgcagaacgttccagtgtccacgggtcctaccacggtcaagcagttcacggaggaagtcttcggcatgaagcacgacgagatctggaccaacttcatcgtggtgatcgccttcatcgcggccttccgacttatcgctctgatcggcttgcgcttcgtaaacagccagaagcggtaagccgctcaaaatgtcccgaatcaccgacacggcggggcacagcttgaccgaaaacgtgaaattgcagaccatacactaatgcacgtagataaaattgaacagcaagcgaaaaccacagcgtggcttcagtttgccgcgaaaaattgcgttgcgttttgcggccttgtagctcttgtgtgactttgtctcgataccagccatcattccacccgccagatatcaggaagcagccacaaactttgtggcacaaagtgaggcaaataatcgtaaaaaaatgttcgtgcttgcgccgcgccaatggccaatgccaatctcttgaaaactgctcgaaggaccgcattcacgatactcaacaaactcattggggtaaacctcacgaatcaagtccgcaatgtcgagtcggcctccactcaccgcttgaccaacagttttacctcactctctcgcaacaagcagcaactccacgacttcgacatagcccccgaaagttgccagcgacagcgcgtcgcacgctttgcacaaaccgcgcgccgtgaagtcctctccaccccgagcttagcggcggcaaactccaccacatcaacgtgcccattggccgcagcctactccaaaattctccaactcgtacacgctgcaaaccaaggggaggattgagatacgagagcaggaacctcaccgcatccaaaaggccattggcagccgtagttgtgcccactttaatcgcgacgtccacaagaaactcgccatcatatttacgaaccgggaaagcttcaccacttcaagctggcctgtggggtatatcggcgtagaaggcatttcatccagtgcgcctgccccgtcctggcggccaagtccagagcagagcgtcatctgcaggcctcgagttgttccgtcgcgtggcgcagagcttggatctcagctgagagatccaggacaaatactccggtgctctatggttggatgcaagtatcaacttggttatcgctttctgaccaatcacacactccacatcgtctctcttgatatttgtatccgcgggccaaaggcagactccagctccgcacccgcagccagcagctccacactctcacgtgccgccgccatgtccaagctcaacccgaacgcgggcgagtgggtccccacgtacgtcgcgctctgctgcgctatctcctctctcttctgctccgtttaagccccaattcgccggctaattcccaccttctcgcgccagcttctcggcgcccgcagcttctccggccaaatcttcggccgccgcgtcccccgtcaaggagccggcggtcgcggagccagcgcctgcgcctgcgcccaagagcgagctggaggcgccggttgtagccgcaaggccaaccaatagcaagacgccgctggagcgcgccgccgagttcggccacgacgcggcgctgaatgaggacggagaacccatttcctacgtacgtacgagagtgcagcagctctttgaggtgtctcggccactgactgtgattggctctgcaatggcaggagggatactcgccgctgcacgacaggttcatctactcgaaggagtacttgctggcggtaaggagaggcggttggctgatagcaaattggaagaaagctgggtttaatcaattttgcatactgtgtggctgcagtttcggccgctgggtgatcgcgtgctgaagggcatccccgacgtcgtgcggaacccctcaccgccgaaagtaggtgctgggctggatgaaattgagatgcatgcagcagagatgttgactttttttattatttggttgcgagtgcagaaagtggggacgaagggcaagggcagactggtgtacacggttgtggagctcttgcaggtgagcagggagttggttttattacgttttgatgctgtagtttgtgttgtattgatcgcttgggctcttttgtttttttgggcattagttccagccgctgtatgagatgatgccggaggactttacgtgggccgacacgatcggagctgacgctgttattggggataacaagaaggccaagaacaagaaggacaagagccgtcagcaacgcgggaatgtgatgtcgtacgacgcttccttggtgtgctacttcaacccgacggaatacgcgacggccatgaatatggggctgtacacgggcccgccagctgaggaagctgcgagtggcgctgacagcaagaacaaggcgcctgtcatcgaaccggtcaatccggtcgaagaagcgattattgcgaagcgccgcattgcgacgtaagaactcggatgcattgcagttgtgggtgcggactatcagctaatgctggcgtttattcgcatgttccgacagattgctggatgatgtcaagccagataccgtgagctctatcctggagtctttcatgggtatcacgatcagttgcacacataccctgcaagaaattatcggactgctgttcgatcacgcaattgcgaacccatcattgaggtaaggagtgctctatcttgctttagggacaaatactggcgaagcaaaacactaagacgactgatgcctactctgtctattgattacagcaactcgtacgcaaagttgtgcacgggaatgtcggagcgcacgccagagttcaaggatggtgcaaagaccatcaacttccggcggattctccttaccaagtgctacgaatcgttgattgaagagcccgataatcagccactgcacttgtccaacaaaaagggaggaagcaatggtcagaacggagcagcgcagcattcctggcggcgaaagtgcatgctgcgaaacgttggctttgttggtgaactgtttcggcggcagctgcttaccgagaatatcatgcatgtctgcgttgcgatgatgcttgatgacgaggtgaaacctcaagccgaaatcattgaggctgcgtgcgggcttctcaatcaggtatgcacatggtaccgcaattattttaccttttgcatctgtactgatacggtatcctctactcttctaggtcggtgatttgctagatggatcaagtccagcctctcggcgaacaatggacgagtatttcgcggtcttggtgcgaattcaagagaactgtcctctcccggaccatgtaaagaagcttattgctgaggtatgtactgcatctgattgccgcatgcactttcacttcaccactaacgtttcgacgattcttgtgtttttttgaacagctaaagaccgtgcgtgtgggtggatggataaagaatcgccaggaaaactcttctgtatcaagcacacctgctgcatctccagcgaaactgacggattgtgaaagcaatggaacggcccaatcccccctatcaatctccgattcggtgccagcccccacggccgcggctgtgtcctctccatccaagtcgagggacgcttagagcacgcgcacatataggtaggagaaataagagacaccatgatagcgagtaaaggtatgacaattaacgtagaaatctcaacaggatagttagccacacccgagcccgcatatttaacccgataaagatcaaaaaaaagttcgagaatagagccaagcatagcagacctttatcccgagcgcctttgaacgtgttgcagttggaacatccccgtgtcatcttgactactgggtggtgagaactcatatcgaacctgtactctcgcgacatcttccctcacatctgctgcatcttcgacctcttcacgcagcgtatacacatcaggctcctcagtaccaggaacgatctctaggaacctgcaccaccgacgaagcagcggtcggtctcgaagcagaaacgcgtccgtgttccctgttacaactgcaactccagagcctgtggccgtcttcatgtattccttcgcttccatcaaataggccagcgtctggtacacactccccatatgactgcaacatcaacagccacattcacgtaagcatgaagtattaatgataccatagtgaagatcctcgagccctttgcagcagtatcacaagtatacctgtggtcagagaaaaacctctcgaagccctcaaccagcaagaccgacgtctctttgtccaccacgtgcagtgaacacaggaaatgctgcagctccgcgctgctgtggaggtatcttacacacaacgaaagagcaacgtcataataattaattctgatcccctaaataaaataaataataatcaattgccgcctcacttgatgtggatgcggctccagatgccgttgtcctccccggtctgcaccggcatttggcagttggcgcagggcgtgagcggcacgatctgagacgccgccggctgctgcgacgcccccgcgctaccgcacatgacgagcaccacgttcctgccggcctgggcctgcgagaagccgaactgcagcagcagcgacgtctggccggcgtcccggggcccgtgcaggtacaaaacgccgctgtcacacagtccttcgctctgtcgggcactcggcttggcgtcttcgggcgcgtgggaacctgcgcagaatgtggcgccgtcgccgtgcgtgaagaactcctcgaggtgcggcatcttggcaaaatgcggaatgcgcacaagagtgatggtcaaaaggcaagtgtagccatctgtccacacatgactacacccgttgaagtttgaccaaatacggttggaagcatacatatcaacactgttatcagggagctgaacgggctgcagtccatgactcgctccttcgtgacgacgactattgccagtgcctgttgaagtgtgcgaggcaactggaactgctacgtcaggtctgagacccaggcgttcaagtccaagtacatggagaggctcgacggcaggctctagatcgtggatctactcactggtcttcacggagaggcttgcgggaactttgcttcatcgtatatactgcaacgtggattcgaccgcccaccttgcgtcgcgtatggatacttacgtcatacggaggaagaacggaggctggtggagccggattgcagctttgggccacgcgaaaatgttggagcggttctacctgcaggattggtttggttcgagtaccatacgctgaaagtggaaatcggcgtttgtcgaggctagcccagtttggatcgcagagctgcaatctggcatcggtatcccggagtggaatatgtgctgtcgataaggctgtctccagcgctgcggtggtgcgaatatcgactcgagcagcgtgtggatggagagtttcctgaaggggaccatcgcgcggagatcctacccatcgaccagaatgccgtcctggagttcaatgcccatcgtcttctgggagttccagcaaatgctgttctccatcctggtctcaacaacccagtggttgtcaatttgtctgttcaagtggaacaactccgtcgaagcatggcagctccacgcgagagacccatttgataaagttgctatacgctcttgagcattctccgtttttttcttttccttgatacatcggccggtagttgctacaacttatgaaggaggtgtcctgtgttctcggagtgaaactcatatcgataacactggatcggcaaggatcgacagaactgtgaacaattgtttgtatctgtagtgcttcatgtattttaagtattacagtaaaatacctgtacttatcaagctcgatggtgtggaacgacacattggtacttcacagtcatgcctgtttgcctttcaatacacgtaatttggactttcacaatttgaagtcaaactacgccgcaacgccaaggtgtaatttaaaagctaaagcaaacttagttttcctacttctccgttcagccctctccatcgtacggagcataagccaacgcctgccgtgcgatgtttttcgcatcgctctcgcttaccacctttttcatacctggaggaaattgagtgttggccgcacggtctcgcatatcgtccgctacaaacgtcatcgggtccgactgagaccgcgacagatcctccaacgcccttccagtgccattggttatcactggatgacggttgatcggcttctagttttgcactgatcggatgcagtaggtgaaggtgaaggcctccaccttcgatgtggccgctcttggcttggatgctcccgtcgaacctgactcagatttcggaactagtctttttcgcgaagtcctttgcgctcttggcatctcacttttgtgcgaaagcacaaaacgatcagcaaattcttgtcctggttcctgcaaactcatgcagacacgaatcatatcggctgggggctttttggatagcgagtttttcttcgataaaatgtaccgaggacccaacctctgcggtgacagcgaaggaaactccctgtcgccattcttcacattcttcacttgaaccacgatcaccgacacgcccgagttgcagaacatcggaatcaccagatttgctccaccttggtcgggcgagaaaacaccagcagcccgtcgggagagcaaaaaccacagcgtcttctcggttggctcattttccagcttcataaagtggcagaaacccattttccacgaatcgcaccgcgaataccatttcctatagcgccccatgactctttcatcgacctccgaactggtcgacactagcacaggtgggtcgataccgacgagcgtttccaagaaggacgaaacctgcacaaattagcccatgaaggagaattcagcgtagtttcgaacgaggtcgaaaggttcgtttgcctcaatgacgatagtcgcgtccatcaccagcaggaaaacaatccgagcgacaatcacaccaacatctccagcattgtgaagacgtatgttgcgcttgacgtgcggcaaaataaactccgacaggccttcacacgcactgtaccacacacgtgtggcgcctagcgccagcaccggatccgacgggtatgagcacagcagactgtcgttcgtatggtccacgtaagcgagcgtcgccatgaagtcggtgacgattcgatatccaaactccgtcccgcagtggaatcgtagcccaagccgacacagcacggatgcggcaccgaacatcgtgtcctccgtgtagctggtgtcacacctcggtttgcctccctggagcagcatctccgcggcaagtgaacagcggccgtatacactgatacaggtattgcatcgctcgctcgcactgtaaggccgcctttgttcgtcaaaccagctcgccagtgtgaatccatagtttgagagagtacaaacggtgggaatgacgaggctcgttgctgcgaagatggcacgttctgcggtaatggagaggtcaggcctacgaaaacggcaataattccacctccaccaagcccagaacttgacgcagagcggatgcgagtatttgccgtgatcagagccctacaaaataggtcgaaagtgacagcaccatcatttcgcttccacgtgcgcagcacgtttgcttcatcgaccaccaaaaccaccactcgattggacacacagcaacgacgcttatcgagctgttcgaattcagcgcgttccaacttcccaatcacagcttcatccgccgtcgtgttcgtaaaaagcttaagccactctttccccacgccactccagttctcttgggcgtaatagtacatcgacacgaggttctcgaccagtctgctttcactccagaggggaccgaaaaaccattggcagagagagctagtcggctggggaaacgccgccgatgatggagatggaaagcaggtgtacaggaccttgaatcccatgtcgtcgctctcactggttcttttggccagctcatacatcaaacgactttttccattgccagcgctctgcaggatcgtcacatacgggtcactagagagagaacgatcttcttgatacactttccagcagcgcttcaggtacttgaagaaatggtcgcaagcgtcgctgcaatactcgaacttggtgaacgcgtggagaagatcgtcctgcgtcagagttgcattggccatgcgtacactgtcacgcagagcaggctcgatttggatggccgccgcttttgccacctgcatggcggctttcatgtcgattccgtacgcctgcataataccacgccagcacatggatgcaacccctccggcgcccaagtggctgtaagtccatcgggccttctcctcgtcgatcaccagttcctgcacagtaatatttcgcgtgctctcaccgggatagttctgcagtatgagttgaaacactatcttactggtcgtctcttcaagaagaaatgacagaacaagattgaaagaaagtgatggacttgagaaaacttaacaaataaccaaaaacaaatgttaaacacgttaaaattactttcctgcaacaactagtgtgtatgacggaggtctttgtctcgttgtcattaggctccatcactctcggctgtattcagatagcaatcaaccgtcatccccgtcttcatcctcagaccgtcgcttcttactttcgggctttggatcaggttcatctcgctttcggtggtgagaagtgaggtaactcgtgctcaagttggtgaagccgttctagcgcatcttgagcattaggtcggtccgacggaattcctcgcattagttcgcgtacgaagtcagctctcgcttccacgacaaaccactcgcctacgtcgctcgatgcaatcaaatggcccaccgaccaaatacccgcttctactgaatggctatcagctgcccgaatctccggggcatgttcttcctgcatcaagtgcctggcattgtctgagagctgcggactgtgagcagcgtccgtgaagtcaaccagcaaccacccgtcagaaccgtctcgacgtttggccacattggcccagcgaacgtctcggtgcatccacgacgcagagtgaaacttcactagggcctctaggacgttgccgatagctcgaaacagcgcggctagattcgaaggtttgacttcaaatcctcgcggtgtgaataccaatccatgctgctgttcatccagcgctgttggagtctgaaatcggtccacgttggggactcggaacgtgtcgaggattgtgtaaacttctttcgtgtgcttaagaatgcgtcggtactccgaggtatcttcaattgtcttcacgacttacagggcgattgcgattccgtttggtcgctcaaagtggccgtactcgtatctcccgttatcaggacacggcagtgccgtcgcttcggcgagaagcgttatattcaataacgccagcagcaatttcaatctcccgctcagattatcaagctcgaacacaccaatctctgtagtcgtcgccttaagctgatcaaacgttggacgctcaattgcgtacaatcgaagttcagtgtcgacagcgacgtacctgaacaaatagggaacatctccataaacccagtcgaggttgttaagcaattcacggcatccaacctcaaccgaacagcctttgtatcctttctccagttcacgaaagaaacacactccatccaccgagtacgcgaagctttccatgaaataacgcgacgagcgtcccggttcaattcgttccctgggaaacataaagttgaggtaatagccgatgacgtcgagccagaacgatacatacgatatccttattgggggacactgtggcccattcaggcgcatgtcaatccctgagaggaaactcacacaagatttggtactctcgctttgaaagagctttcccaccagctccgagtcacatgatgctgtcgaatacagctcgaagaaatccgtggaggccccaattttcactgccagttcttgcttgataaaagtcttcagagagtcaagcggcggtagatccgatgtccgagtaatcttgcatgctcgaaactccttcagacaccactttgtccaatcttggcgtacaaagccactcgatggctcctccagaccgtccaccagcacgtgaatttggcggcttgtactcccagcaaccaggtctccggccttggtcgacggattcaaggcggtcgttggccactcctcaatctccgccgccattaggccctcttgcaggactgctacaagtttatctgtgcacgggagccagcggccatcgctcgttttcgtgatggaaagcagcaggctcgatgctgagcagttgagctgtggcaatttctccaatagcaccggcttgagacctcccgctagccgtctgggcgccaactcgatgttaactggggcctgtttcattttgcaccgtactacgcagacaatgggcaccatatttgctccgaaagagtaaaagtgaaaaaccatgctcgagccaagaaacagattgaaagaaagtggccaatctgaaaagatcacaaaaaatcatcaaggaataacgcgaacttaagtctcaaaagtctcagccatatccagatcgcagtccactatcgatgcccccactccattgggcatcttagttcctgcgatccagacgccccagagggagagtatctggattcaagatctccattgacgttgcaatgccgttcatgaccgaatccacgatcatctccgcggcacctccatcttattggcttaaatttttgaccacgaagttttcgttgaagctaaatagaagtcggaccttcgcttcgcgagagttattcaacttggtagtccgaccatgaaagtagtcggcttgttctttgttgcgtcggtggataaattgcgagcgtttctgtgttccgtcagcttatcgggcttcggcattcaacgtatatcaagttctcctttatgccacgtgagactgtattgtgagtttcaaaacctttcaccagcgaaagttgttggtgtcacattttgagatacatatcgcttgcacgatactggaagtactaaatagcgtcgaatcaatgtaccactcaagataaaaaaacgtgtggagaatccgatcgcagacgcgctggtatgtgtgaatttgtttcgtttcgaagttaggtacattgatgtcacttagaattctaacgactccctatgtccgtatcaacaacttgttgggcgcttgttgaacaagcgccaaacgtctggatttgtgcgtgtcagagacatcattgtcgacatgcctaatcccacgctgtgcaattactcattgacctcaatgattgaggttggtagccaattggtgtagtagctaaaggattaatctttggaaaagttgggcgctagcactgataaaattgcgtatatctaagagtatatgcaccttcctactggattaactgccaggcatggctgatgggacgcgctatacagttatctatcggtacacatcctctaagagtgcttgttctgcaacgcttgtatttcatttctattcatactaatctccctgcgtggggctgagtgccgacatcttcaaaaagatgtgaacattaagtcaataggtgtaaggtcaataaggacgcgtaacccttctagccccagaccttattctgtatcctacagaataagcattagacttgattaaagtatacttcaaaacctgtcaaagatttgctgttggaagccctttcgcatcttgcggtcaagcgctgggtacattgtgcacagaacagctacgaaagtgaacaaaacatgctcaatgtatccaccatatgccgaaatggcgagcttctattggtcgtggcgagcgtagagcacgctcaaaacctgctacatggtaataccttgcaaggctgctaaggcagcatacttcggctccagccacccatctttggcacgtcgcgataaacgcggaggaagaaatcgccctgttcctaactgacgtagtgaggaggaactgggcgaattcttccttgtgcttgacattagcgcatcattagatttctttagcccacctaacaagcttgttacgattgtctctctaacaacaccagggagcttgcatgctcaatagcccgtaatgacacgcactacacacggttcctcttgtacgaaacaggacaatgtatgatattcatgccaacgcctacttgttcctttacatgcgcacgctcttcaatgttcgcgccagccgtgggtcatcttcgccattttggcagcctccgctttgctctgtagcctccggcactgccgctccattcctgccgctttcatcggtagcctccgtcgtagcctctgtcccttcttctgtaatctccggtgtaacctcatcacgcggagagcttcttctgtagcatccgtcgtagcatctaccgcttcttctgtagtctccggtgtagccacaccatgaggagcgcttcttctgtagcctcttgagtagccactgcatcagctacaatacagcggtagacccggctgtagccggcttcgtaggaaccgatgaggttgtgcgctgactccgcaatcgatctgccaatcgggccacacgcgagagctcatagcgtcgtgtgggtcggatcaccaggtctggtaatcaacatcgcaacgtagaatcaatataccactagtacaatgttacagagcaaagtacacgctctcgcttacctgtagatcacaatggcgctcatcatgatcgtcttcggccatggtccttggtcacttgggcgcgctcgacgggccccaacaaagcttgcattgcgacgtcttgaacagcgcagtttcggaatgaaggaacgtacgagtggctgacacgcggcggttttaggcttccacccgaattttcaaacctgttggtggtttatactcgtccgtctattaccgcggaataaaccccgtttatctttccatcgctaatctaacgggaagatgtgcacaataccggctatacaagcatccatatgcgaagttcgaaagagaggacaagtttgctggatattatgtcctgtgacaatgcttattctgtaggatacagaatacggggttagaggggtaacagcgcatcccttcatggttcttcaaaacagcttgtcgagtcaacaatgctgaccactttgcttgctgccttgtgaaagatagttcgttgaggagcacgctatggccttcaccacgtaggaactactgtacatgtgttggtaccggcgcagataagattttacagtacccggccactggacgtcgtggtccataagtataaaactatggcgcatgattcctggaatcggtaaactttgatgccttgcaaccaggcctcggaaaatacagtatcatattgaattgcaagagttcggtctccataataattattttaatatatcattcaccaaaaatatgtatttatgtcaattacttttatatagagaatcatgttaaactcggtttttgtatggtcaaacattttactgataattgggcttcaataacaacaattgcaatacgatcagcaaccaataatacgtatttccgtacaaaaattcagtaattgcaatataataattattttttccgaggcctgcttgcaacgcgcattagatgcatacttgtgacagggcacacagcacttcttaacagtggaagcaggagtatacaaactccaagtgaacagccgttcacgtgtccctggtctgaaggggacgacttgacttgaaatgcggtagatctaagactgaatgtatttataggttggtacagatttggcctgcatacaaatcccaagttccctatagtttgtgtcatacaaaatgtatctgttggctctgaggccacttgggtcactatccaggggagtgaccgatgtagccatccctgaatagtgacagggtcactattccatgtaaccccattacatcctcccccacttagattcgatcttatcgaccaatcagagcgaggttacgccggcgactcacatttcactcgcaaagtcgatatccatcgacaacggcgcgagctctggcgcctcggctcccgggcctcacagagcaactggcgcatcgccgagcaagccgcagggtctccacgtcgaccggaagcatgcctccaaagcgcagtgcgcgcagtgcgaaagcaccttcgaaaccgcgggccatacggccgaagaccagggcggccaaggccaaggacgagtcgtccgcgctgatggaggccacgaaggcggccgaggaggcggtgcgctctcgtagcagcacgccgaagagtggctgtcaggccggggctcggagcaactctcctgacgccgcgaaagacaaggaggagagtcctcggggccataaaagcccggctcgcgactgggaagccgccgtctttgactgcacgatggtcccgtactccggtgagagttcacccgacgacgagaacgtctcggagggcagcacgcacgctgccgaaggcacggagctggcggcaggcgacatgaccaacgcctcggccgacgcaaaggcctcgtcggagaaggaggcggaggacgccgagtccggctcaggcgacagcaagcagtcgcacgacgacgtcgccatggccgacgctggggtcgtggccgagaagtcgccgagcgacgcgggctccaagcccaaggaagtgctggcatccaagcatctgacgctggcacaaggtcgtgagcgtgcccaagcgttgaaagcggctgccgctgcgaaggccgccgaggccaaggcgaagaagcgttcagcttccaggtcgcgagctccgcatcgagttcgctgaactcgtgagcaagcgcaagctccgtccgaagatggacgagctcaagcaagaggcgagagccaaagctcgtgaagagcgtgggcgcggtgcgactacgtctgctaccgtgccccgggtatcgggtcggctcgacgatccacgcggccatggagactgcgagtctcttgatagagcgaggcaacatcctcaccgagctgctccacggcaccaggctggccagcacgagcggcagcctcgccaccaaggccgacgccaagggcgatctcgaggacgtacacgcggtcccgaagaagccgaatctcctcttgctgcagggccaccacctgacttggggccctagcatgcggctgcgtcgcctcaggctcatagccatggccgtgcgaggccaccgccggccctccttgatcgtaatggacagatccactaccacgtggaacgagtcgtccgggagcggcggctccatggcaagcgccagctgctcgtgaagtggaggggctaccctgagtcggataacttgtgggagcccgttgagcagctccaggcagactgcccgaaggctgttacgatatgggacgagtagcaacaacagcttcgtaagtagtccttggcttcttgcttcatagccacacgccgtatccgtagcagcagcagccccactcgtatcagacccaatttgaccagcgctcgtacggggcccctgcgtatgctgctccgatgtacgccgcgccgtcttacgaccagcgcgcgtaccaggcgccttaccgcgacgcgacgccgcgcttcgaggagctgagctcttccccaccgggccaccctccgcttcctgcggggcagccagagccagagtgtcatggtacctcttaaccccttacttcccaacggttgtaccgtagatcataaggggtgtatagctcctgtcggttttttcgcaacgtctctgttatgttggagggtacaacataagaaaattttaatcttgaaatttgtatgtacgtactgtcactacatatccataatgaaataaagataataggttgagtggaaaatggccatttcagagagattcggttgaaggtgatttagattggacttgccatccacctcgaccccagtggccgccatccactcaccactcatttcagaaaaaaccgcggcgagagcaagatggtcggcgcgtcaggcaagacaccacgctacgagcttacaacgcgggagcggcagctctgcctggaagggctgctgagtgaactgctgagtgaacggcgatggcaacgccggctccgacggcagcgtggccggcgctgaagtgtaggctagcatgatcgattcgacgacgggttggcggacgtggaagtgtaggctgtagcaattgcatgttctgactttgcatttattgaaaaagcaatcagttgacgcacaatatccttcgttctttttttgtgatacatccatgctgctgcacgtgctcaatgttcagagatagggctattcagataaacagtacagtgcatatgttgccttctccatcataagcggaccaccactaaggtattgagccaacgtaatgttggatatgccacgttcttaacctgagacaagtctgtactatccaggcagcatagtcgtgcaaaaatccagtccatacaaattcctttattatcttatgctataccgtagatcataagggtcaaaatataccccctacttttttccgggaagtaaggggttaagacgacccacgtaaaacgtcgggtgactcgtcatcgacttaggcaagtctatggtgtacgccgcgccatgccggctgaggaccgtgaagggtccaatgaagcggtgcttcagcttgttgctctcgaccgagctaacagtgtttaggggtcggtttctagtatctaggagaactaaatccccaaccttaaacacgttcatgtttcctcttccatttcggtcagagtactccttctgtttgtcttgggcttgcgccatggtgtctcgcaccctgttgattatgttcagcctgtcttcggcaaacgaggacagttgcttccgcaaggcggctggactcgcgtccgagtcttgggaggaaaaggttttcctagcctctcccccacttaggcccgaagccccggtactgcctcgtaatgtgagcggcacctgagggtggcacaacccgttcaggtaagagggcgtaacgcccgtcgatgcatgtaccgcattgttgagtgcgaactcaaccatgggcaagcgatcagcccaagagcggggcatctccacgcagatactgcggagcgtgtcctcgagcacgcgattgactcgctccgtctggccgtccgtctgcgggtggtccgccgtcgacatcgaccgccgtgtgccttgaaggcgaaacagcgtctgccagaacgcagcggtgaaccgcgggtctcgatcagagacaatggtctcgggcagaccgtggtgcaggaagacacagtccatgaacaggcgagcgacatcgtcaccagtgacggtgtcacgaactggagcaaagtgtaccatcttgctcatacggcaaaggcaacaacaccggtgttgccacgggcatcggacgggaggccgaagacaaagtcgagactcatcgacttccagcagtccgctgggaccggcaggctctgcaatggtgccgaggcgtgaccggcaggcttcacgcgctggcacgtctcgcacgtccggacgtaggtggcgacccacttgtacatgtgacgccaccaaaacgtctgcgagacagacgcgtacggcttctcacggccaagatgaccactggatggagcgtcgtgcgcctacatcaggatgtcgtacttgagaccctcgtcgttggacacgacaatacgagaaggatcctcgggctcgaccctatagtggagcaagccgtcagcccactcaaagcggtgcagccgtgcacgctgtcggggcgtgagccactcgaccttggcggccgagccagcggccaagaaccgcacaagaggtccgagactggcatcgtctcggtatcccagcctgatgcgatcatacagatccgtcgtgacccgactaatatgagcaagctcgtagtcgggtcggcgcgacagcgcgtcggcaagcacgttcaggttgcccggcttgtactcgacacggaagttgtattccgcaaagaatgacagccagcgcgccagccgctgcgagaggtgcggcgtgttgacggcagttcgcaaggacgcatggtttgtatagacgacaaagggcttcgagcccaggagatgtactcggaacttgacaagagcgtacttcattgcaagtagctccttgtcatgaactgggtagttccgttcggcagccttgagctgcctggaccggaacgagatgacccgttcgcggccttcatcgtcggcctgcaatagcgcacagccaattacgtagtcagacgacgctgaaaggcttcgtctcgtccggcaatgccaggactggcgcgcgctgtaagcacgctttgatgtcgtcaaaagcaccttggtggcggtgctcccagcgccagtcggcatccttcttcaagagatccgacaatggtcgtgccagctcggcgtagcttgcactgtacttgtgcaaatagttggcaaggcccagccactgtcgtaggtccttctgcgaccgaggtggcggccaagccgcgatggttttcaccttctccgggtccgcgtggacctcggcgctgctgacgaagcagcccaggaccttgatctcctcagctgcaaacacgcacttgtcgatgttggcgtacagcttgttcgcccgcatgactttgaacacccgacggaggtgctggagatgcatctccatgaccgaaaggcctgcctcggcacggctgtggacgaagatgtcgtcaaagtacgtctgcgcgaacgcacgcaaaggtcggaacagttgtgtgaccaggcgattgaatgttgccggggcgtttgaaagcccctgaggcatgaccagccactcccagagcataccgctcggcgtgctcacagccgtgagtgggatgtcgctctcgcgcgtcagcggaaaagattttttcatgccattttgagaggttttccataccaataggattaattgcattccagccggaggaattgcattccacccgggtgaattgcataccacaagtactcccgcaaaaacatttgagctcttctgagttttgaattatcctaaacgttactgaggctgtcgttgccagccaacaactacaacaaaaattgtggtgtttcctgacaagcgtatatactgtcaggaaaccgtacacgtgcttaagaaagactagtatgacatcttcagtgtatccactagtgttgaatgggtttggtcaggaaacggcacacgtgcttaagaaagaataatataatttcttcagtgtatccactagttttgaatgggttttggcaagaaagcctctacctgcgcatgaaacagctagactcatttatatctggcgaccaaaagcccatgtttttggaacaaacttctagcatgtgtgcaccataatacactttgtcattctgcaatttgcaatgaaatcccaactactacgccgagagcgcgacgagttctacgttgcctacaagcgcatgcggacgtcctacgaaaacgcagtcgaggtgatgaacgacctccaccgtgaaatttcagctcaagaaacagaaattcgagaattacggcaagctcgatctgcacaagatgaccaagatgtacaagataaccaagatgaccaggatggccaagaagaccaagatgaacctcgccagccccaaccctacggcacgacaatcgcggacctcttcggggacacgagcagcgagagcagcgaggactcggacgtgccgcaaatggaggatagttctgccacggaccatgctgaaggagacgagtcggacgttgaagaagcggaagatcatcatgcacagcaaaaccttcaagtcaatagcagaagcactccgccacttgcagtcgcgcgagaatacggcatttcgagagaggtctctgtttcgtcgcactacggtgttggtctgtgcatcgcacgttgattgcaaagcccaggccagagtaactaagcgtgatggggacattttcaccctgagcacgagtgggtatcacacacggcatcttctgccgagttcaccagaccgtggtgacttgtcggaccccgataggcgccgcttaaagtccagtaaatccggatccgactctccaaatgacagcaacgattttgatggtagtgaatccgagttctatcctgacgatactgacttcgacgacgaggatgatgaggataaggatacgaatgatgtcgattcagacacggcagcacagcaggaatttgggatatccaactctagcagtgctgaatgtgataacagccacgccagtgttgaatctgcatctgtggggtataatgacgatagcgatgtcgcagacgacacccacactgcttcagctggcgttaaccacgtagacgaggatggattctgtgttctcgatccgttcaagactcgcgaaaaagcccgtgtcgcaattgatggactggcgaacattcggtacaaacgcctcaacgacaacagagacacggtgtggtacaagtgctcttctcacatgaattgctctgcgacggccaagatcaaatttttcgcttcaagcaaaacgtacaccgccacattgaatggaatcgacagtgacgtcgttgcccccctcgatgagcaacggactggcatccacaaaccccttcacgacgaagtgaacaaccttttacttggggggcaaggacctgcaaggtgtttgaccacccttgaaatgaagtatcgaaatgacgaagaaatgctgcgccttctatcggatgttggacaactcaagaatcgatcgcagctcctgcattatcgaggcgacttcgacatcacttcgatggcggacatcttgaagtgggcatctccaaaatgtgtaagacaaaggaggactttttcaaaggaatggtttacagggttggcatggacctcaaaacattcgccaagaaacccttcaactaccgcaacgaattactggttcttgacatcttcaccgaacaagttggaaaaaaagatgtttcatttggtaatatcttcacgtcgaggaggctttttcgcaacgctgctcttgcggttttgggacaacgtgaaggagtcttggcggtgactgatggtacctacaagatcgacttcaacaactggacgctgatatcattcggtacctgtggcatgcgttacaaggagaagaaggagtaccaacacaagttttacccgatagccttcctgttcgtgcgtgcagaaacaacattagcttatataaagctattctctgttatccagaaccgcacgaaggatttctttggtggagacctgactgtcaagtatgggtcgatggaccactcggccgcaattgctggtgcctttcgcgcagtatggtctgacatcgagctgttaaattgttggcctcacttgggtcgcaagtccagagagaaaaaagggctactgtcagacacacaagtcaacggcgatattatcaaaccgcagctggaccaactcgaaaatgctcgttctcgtgagcagttctttgctctgtctgaattagtcactcaaaactggagagaccaacgccaaaggaggtatgccaagtggtttgatgagcagtacctcacggacccgtgggacctgtggttcatcaccgccagcaacgtcgctggaatagtaccaaaccagaatccaattgaagcacaccacagcgctatcaaaaaggtagcagcaggccatttgcaagcagcgatatcgcatgtcttggccgtcactttgccaaagatagtgatttactgtggagccgctatacaaataccgagttcttgtggccgtttgcatcaggtcccgttgatgaaaaagtgtatcaagctgtcaaacggctctgcgaacctggcaatcactacccatgccacgagcggatgtctaagcgtgaaatcgccaacatcaaccgctactacttcaatgcagactattgcctcattcacgatgaaaatcggaacgggcaaaaggtcacacacacaaggacatcacgttacgccaagtccctggagggagttctaaaaaaagatgaggtcgtgaacagcatccaactatcgtaccagtccctacacgcagtggatattctatcgcgaactcctattgaacacgactgggcttctcccatgtggacaattgaagaggtaattcaatcccttgctgttgcatgctctgtagatgcattactaacgtttgtgtgtgggtgcatacggtctaacagattcgggccctgcgaagcaaatttaaatgcgactgtaaagagttttaccaaacgggatggctgtgtgggcacgttatgacgtgcttaaaactcgttgatggcttggactttccgctgatgctacgaggcttgctgatgagacgcccatccggtcgaccaagaaagaaaaaacagtgtcttgagcgtgaaacgccatcatctggccagtacagtgtcgatgctctcatttcccggctcattaaaactcctgcgagcgttatcacttgaagcgtgctaagcacatggccagctaaaaaccgggatggcgaaatcgaagatcgagactttgtgggggtagtggaccctccctttatgaaaggtggggctcgctattgggacgtttactacgagaaacgcagtgaaacggtgaccatggcagccgaggagctcgccaacgcgataaactacgcacatcggatggggcatcacattgttccccccgggaattgaaaacaagcagaaagtcgctgaacttctgagatttcgtcattgcttaggacgaggttgcatgtaatgaggctagatgtagtgagggcttcgggcgctccgaactaggtacctgctatacatcaacccatctaggacactttcacttgtattttgtatggcaagaattaaatattttcatttgctttttgtatggcatgcaattaatccggtggtatggaaaacctctttttttggcatggaaaaccgctttttttggcatggaaaaaatccgccaccgcgcataaggatctggtagtatccgtccaccaggtccagcgcgctgtacagcatgcagccggccatgttgttgagcaacacgtccttgcgcgggatcggtgtctgcgcaggcactgtcgcgctgttcagcttgttataagcatgaaccagacgccactttccgttcggtttgcgaacacagaaggtaggcgtcgagtgcggggactttgactcccacaccatgcctgccttcgccttggcggcaatgaaggcatcaatgacttcacactgctcccggggaagagaccattgcctcgtgacacagtatttcgtgcccggcacgaggtcaatctcgtgcctgattcccctgcccggagggagattggacggtgggtccttggacaccacgtcctcgaactcttttaccaagggatacaccgggtcccgggggttcttgagaatcgcagagcctatgcgcgacgcgcgctgcctctggaactcctccaggacttccgtggtcatgaccgaggacgagttcaactcggccgacgtggactccggtcggaggagaaccaattctgcgatctccccggcctttagctcggccaagaagtcctccatggcgagcccttcaaggttcagcaactcggaaacctcgggcagagcagtaaactcgacagctcgtgccttgacccgacgaccggtcacgccgtcaaaggtgtgataacattcttcggcggccggagccttgactcgaggctcggagtcgctggcgactggcgtcgtcgaccacgcgactaggcccggcttacgacgtgaccctcgggtgtcttcatctcgtggcgccgccttgacagcaccaccgatcttctcgatcgtgtgcggaactatgttacccgccttgtccttgagcggaacttggttacccgccttgctgggtggaactatgttacccacctcgccgtgtggaacttggttacccacacctggagcgctcccagcgactcccgcatcagttatggtctgagtgacttcctgtggaactatgttacccacatcggaagcgcctgcagtgccttcctcatccgttacggtctgagtgaccttgcgtggaacttggttatccacgccagcgtcagcgacgccttctccagcagcccttgctgcctgcggtacttcgttactcgcgtgtggacctaagttacccacctggtaggcacctccactctcagaccttgtccggcccggccggagtcgtcgtcagtctcgacggaacccaaaactcgctggacgctgctgcgccctggcggccctcgcgggcgccccagctgcatccagaggtgggagcatgactcaccaaagctctgtcagagcgtgggggacggctggccctgatggccttgccgcgccagtcgacccaaggctcgtgtttctccaaccacggcatgccaaggatcaagtcgtacttgtccatgtgtaggaccaagaacggctccgtgctgtcgaagtcctcgaacttgatagcgaggtccatgtggacccgaggtacttctaccaccgtaccgtcggccagtcttaccgagaccagcccgttgcctttgctgcctcgtagcgcatcggcgtacttgtcacgattgcgtgcgacagtctggcggcacgcaaagttcttggacgccccagagtcgatcaagattctcaagggatgatcgtatcccggtacactcgcgtacaccacaagcagcccaccgctgcccttctccgcttcgagagtacagagaatctcagggactaagtccccatggcgtgcgccacccgcacgcccctcatgaagacttagtgtttccccagtagggcgccccgcccccactggtgcccggcgttcccctggttcctggggcgcggcttctgccagcgacccctagagccaaagggcttcgaagacaacttcttcttcagtcctcccgtttcatgtgcccaagcttgccacagccgtagcagcgaatgtcgctctgctcggccatgcccagatccatgggaaccggcccgttggacgctccattgccggagttaccataaggcgcaccgccagaggcacggttgctctaccataccgtggcgggggtacgagcctgcttgtgactgtactcctcctggagagcgatctgaatcgcctcctccatagtgttcgcttgcacacagaacagttgtgtgcgggcaggaccgacgcgcagaccgtccatgaacacggtcaccttgatgtgttcaggcagggggttccccaccaaagaggcagtgagcactcgcatctcctggatgtactcatgcaactcgcgccttccttgtttgcaggcgaggaagcgcgagcgctggcggtactcgtagttcgccggaagaaacgcggcccgctgctgctcgcacagctgggaccatgatgcgaagcatccagccgtcgttgcttcgtgcgtgtacgcccaactcttagcgcgaccactaaggttggagagcgcaaaggcgacacggagtcgctcgtccgagacgagagccgcgtccatcgcgagctcgaccactcgaacccagaagtgaaggttttcgtcttccttcccttcgaaggggtgaaccttcagccgcagtggcctgcagcccttgaacgtgggcgaggagccctcgctcgtaggtgtcgaacgcgttgatacgctcaacctgctcagccggcgtcgccgccgctaaactacgcaggcatctgtcccaaagatgcctgccatcttccgaacggactcgtactgcgagtcgctcagatgaggaaactccgtccgatccatcttggctcactcgatgagaccacaaaggattcaggtagtccaatctatccgcgtaggcgtaggattgactacaagtgctaccaagtgtgacggggcacacagcacttcttaacagaggaagcaggagtatacaaactccaagtgaacagccgttcacgtgtccctggtcggaaggggacgacttgacttgaaaagcggtagatctaagactgaatgtatttataggttggtacagatttggcctgcatacaaatcccaagttccctatagtttgtatcatacaaaatgtatctgttggctctgaggccacttgggtcactatccaggggagtgaccgatgtagccatccctgaatagtgacagggtcactattccatgtaaccccgttacaatactactcacggcccaaggccggatgaacgccgttcggtagcttgccgtcagtaggcttttccgatgcacctcccacgtgtagacggaggagatgccccctggtagtacagctcccggtacgagtcgaagatctcgttggcctgcacctcgagctcgcgcagtgtctcagaggggtagaaaccttctccctgggcggtcgtactggtccacggggagtggtacgagtccccgtcgcggttgtagtcgcagagcagatacttgcgaccgctggtcgggtccacccgcacctgcagcggctggtccacgcgctggtacaggtcgtcgaccagcgcgggcagcagccgcgttagcaggggcgtaactacggtagacctttttttagggggggcacggggctagggttacgaaactagactccaaatttagttgaagcgggcacttctctgcgttaaccgccactaccgtgcattcacctctaggcttcatggggcctaaacggctcaaggcggtgagcatcatcgtgttctttgagcgtagtgaacccgacatcagcagcgagcagaccatacctaagcatcatgctgtccaacaacacgatattcctacaaagaacagtctagagcaacaaaagaaggaaacggcggcatggtgtcagttgaacgaagtaccgatggatcctcgagagtgcagtcccagcgacttcgtgcgcaccgatcccgctgatcgccccccgaacttgttcctaatagaccagctatcctacgacccggttctccggaacgcagtgcttcgtacgtacgctcatttggggggcccatcagcttcgcttgagccaacaccacgcccgtaagttcggcagcaagatgcgctcttttcagtcgtcttggtacgaaaagtatccgtggttggagtactcagcgaacacgtatgcagcttattgtctatggtgttacctaagtcgtgaggtcatgcttgtgggcaaacagcctaatgtgtacacagagccgtcacaagggttcagcaattggaaaaaaagcgtgcagtaaggatggattcgcggcgcacatgggtgactccttttcgaagcaccacagcgcacatgcaaattatgtagtgttgcttacagcaaggcacgacatcgagttatcccttggccgcgccgacaggacgcaacgagcccagaaccgcatgcggcttggcatgatatttgatatttgcctttttctcgctagacaaggaataccattccatgggcattccgaggcagtaagttatgcatgacaaaaatcgtttttatgcttttgttattaatttgttgtgcttgtttgttgtatgcattaggatatggcatcaaataaaggcaactttttggagatggttggcttcatgatggagaaagttactgatttttcgagcggaatgtcttctgcaccgcgcaacgcccacgtctccatgagtgcagcagcagttcgtgcaatgcgcagcggacttggtcggtgaaaatatcattgacaacgagatggctggcaagtacttttccgtgttggttggcgaggccagctgcgaaggcaagaaagaatttatgtcgatagtggtgtgctttgtgtgctctcgcatgggacgaattctggagcgattcttaggggcagttcatgttcggtcaacgggagctgctgatcttttcgacagcctcatgaaccatcttacagcatggaacatccctgtgctcaatctacgcggccaaggatacgatggggcagcgaatatttcgggggactacacaggactccaaacgagagtgcgtggagaatgtccgtacgcatattacgtgcactgcttcgcacacaggttgaacctggccattgtgtgtgaagccaaaaaaatgtttcggtggtagaatgttttgatgttgtgcaaaacattcatacttcgtgtggtgcctcttgcaaacggatgatatgttaatggacacagcgcgtgacgagaaggaaaaactactgagcgagggcgctctggagactggccaggggctgaatcagcctatgaacacaagaggcgcttagtactacgcgatggaattgtcgtgtgagggccctaagtcgcgttagatccctgtggatgccgataactaacgtgcttcgaactgtcggtagtaatgctgtcgaccctcaaaagcgagctgatgctgctggaaatctcgacaaaatgtggacttttcaattcgtttttcacgtagaagttctcattactgtgctcgagaaacttaacgtgctatcgcaatatctgcaaaacaatgatatggacgtggcctcagctgcattattagcgatgcgaattcgagaagagctgcagcaaatgattgatacgcctatgcgcagtgaggctgagaacagtttctctgctgtatggactaggtatgttggtttctgtagcacactgccgactagtggggggatgttggtacctgcaatgaaggcgccgtgtttccggcgaggatcaagataccgaggcaaaggtaaatgtggtgtccctgatgcagacaacgatactcagcaaacccaagaacaacgtttctacgaagatgtgtatgtgccggttgtaaaaagcattcttcaggagctaaaaagtcgatttggtgaagatgttcttggtcttatggagctgtgcggtggtctaagtcccaaaaacaatttttccagttggaatcccaacgacatcagatggattgcaatggactattaccccaatgacttcaacaggcagttccaagcggtgctcgatcaagctgcccactttggtgctatcgctcgacgggaccatcgcttcaaaatgcgcaagtcgttgggtgacttgagtgaagcaatggtggctacaggcatgaagagggttttcccgatcttgtatcggctgctacagctcgtgtgtgttctgcctgtgttgactgcaagcaccaaacgctcattttctacaatgaagcaggtgaagacacgactacgaactacgcagggcgatgaattgatgtcggatctcttgctgctttcaattgagcgcgacttatctggagtcatcaaccgagatgatgcaatcgatcgatttggcaccatcaccgagcgccgcattgacatttaatgcattaatacacgtaagcactaaaataaattgtcttccgccaatctgggagggggggggggggggcaaaagtttgggggggcatgccccccctaatcgggcctagttacgcccctgcgcgtcaggttgtacacgttcgtctccacctcgcgcgggggcatgcgccgcatgaggttcaggcacgaagtcatgccgccgtcgtccgccatactgctatgtaccttggtgattgtccccttgtgtgtctgatggcatcagatgggctgcgattgggtggaattctaaggtttatttatacccaatgacaagaggttacggttcttttggaccaataagggggcgttccttggatacagtgttttcagccaatgacggcgtgttgattggctggaagcgttggcggtgcgtccacaccagcaattgacactacacagtggagcgacatcatgagcaagcgcgtcaaggtgcacctccagcaccaggagtccttcgacagcacggcgcccgtcgtgggtacgctacaccaacctcactacaatgcctataacaaccgcttacttttaactaacaaatcgcgtgtaattccacgacgattaactctgcagcgacgttccgcaacggcccgccgccgccgaaccagcgccaggacctggcgtttgaggtgttcgagaacccgaccaagaagcagcgcctggtggtggccagctccgagaaggtggcgtaccagggcgccaacttcggctacctgggctcgagccacgacttcgccagctacgccgtgggcgtgtacgaccgcaacaccaaggaggtgcggctctgcaatgtgaaccagatctacgtcatgcagcaggccatcaagaacgcgtccgagaacgtggacgacaaccgcggcgaggacaagagcttcatggagcagcgccgcgacctggtcgaagtctttggtagcaagaagagcaagcgcatccagaagaaccgcgaggagaacatcgtggacctcgagcacatcagcggcgccgcctccgtcacgcagacgctccagaagaagatctcggccgccaagaagcagctcgaggaggagcgcgcgcgcgacggcaccttctccaaggaggcggcggcccttgcggctacccgcaacgagctgctgccgccctgcgacatcgacgctccgacacccgaccgcgtgtacgacctgaccaagtgtaagtttttgccctgtggaggtgttttggtagtatggcgacaaaggttttgacaggttctggtgtgtcgttgtgtgctgtacagtcatgaacagcagtgtcatggactcgctgaccatcatggccgaggaggtgatcgaagcgctgcagagcacgagtgtggccgagtacgcggcgaagcagagtctggcggcgctgcccacgcggatgatgctgtcgctggctgcgccgtacgacgtgaacaaaatgtgcctcgtggtgtacttggcgtacttgatcgacttttaccactcgcgcttcccgctgcacaagtccgctgcggccttcagcgaggagaagggcatcccgctcgtgattgtgcgtcacttcctcaagctcttcacggatatcggcgagggcaccaacggccacccgacgtacttccaggccaaggccaagaaggacaagctctgcctgttccttatcgttgtggcgcttacgctcaacggcttcacgctggacctcacagaggtcgccgccgacctcaagcgtacgcccatccagatgcagtcgtacgccattcagctgggctgcgtcgtcgagaaggccaaggcggagacggccatctacggcggtgcctcatcagttgggtccaagaagaatattctgcgtgcggtgctatcggtgccgctgcacttccccaagccgaagcgtgggggtcccgctcgccggtaagcattcggcagcaaaatagaagccgtggatttacaggactgagacttgttgaggtcgaaatacatatacctttgcatggatccccactctactgcactagctttctactcattgtggtaactcggaatcggcacgaacgtactgtatcatcctacgacatcgtgatcgggtggaggaaacgcgcggggattcattatgactactcactgcattcaaaacttgcgttgcattaattgcactgaagctcccaagtggagcactcgacacattttcctaaccagttactatagatacatctctctcttcattctttccttcctgtctggcttaggactgcgtcgggcggccgaattccgagtctgtggagaagcgcgaagagagcgccgacgtgcggtcgaacgagcccgactcgagcatggcgtagctgtcgttcgtgccgcgcatctcgtccatccagtgcgacgcctcctgatctccattgggcacctcgctttgtcgctccagggcctccgagacagtcgttccgaccgtgtcgcgaccaaagtcatccacgctgccatcaaacgagttgagcactccctggccgttgtacgtgcccgaaaacgagttggcgtacgaccccgccatggagccagtgaacgaaccggcgtaggactcgttgtacgactcggcatagctgccggcggcggcgttgaactccatcgagtgggcctcgaagttgctgttgctgggtcgcgaggcctgcacagcgtccttcctattaaagggcgacgtggacggcgccgccccgttcaccgtcgactgcgccgggtcgaagttgtacttcgtcggctcctgcgtggtcggactgggggagctaccgggcacgtcgtgcagcatggcgatggacgattcgagcggctccggcgcggccttggtggtctgcgactcgagcgcggtgaagtcgtactcggtcggcgtattctgcgtgttggccacggactcgttgggctccgacgtgttgatcttggacaccgggtagttctgcatgaactgcttctcgtcgtcctcgcgcttggcgcccatggcgcggtaggcgaagaagccgccgacgcccagcacaacgaccacaccgacgatgatgccgatcacagcgcctgcactcattctgaacagctagaagatattcctgtgggaatgcgcccttcgattcgaggatgaggaagcgagcgagcgctgggccgccgggggattcgattgtgggcgcctgccgcgtccgtcgcactgaaatcagcgcgcgcgtggtccgtcgttgggccgagagccctcgcacaccgatctgcggttgtgtggaggcgggagagctggttgtgcagtgccaggtcgcttcagtcttagaatgacagccggcacgcggtcagcgcagtatagtgagaccaagagagcagccgttttaagggctccatcaatacgagacactcgctgtgccgcgttttcgacccattcacgttagacttggcgtttgtatgctcgaggctgagctcacgtgcacgacgatcggacgacaacgccgcctgtaccacggcgagagcctcggcggagctcaagctttcgagcttttcgggggacggatgctgctcagcagagcgaagcccatggcgtgcgtgagcggcggcagcgcagggcaaacaccgcgacgttccattcgtgaatacggtcctgcccggggctggtgtccgtgagcgacgctggttacatcctgcagctgtgtgtcgagacgaaggaaacggcaggaagttaccatgagagatcgcgctttggtggccccaaagaggcggagccgcaccatccgctttttcggtgacgccaaacttccgtccgtgcaagcgaagggagcgcaggttgcctgcctgtgccagagcctctgcacggcggcgcagcttgcatatctgctgaagcctggacctcacaacaaagggaaaggttggtccttcaaggtttcgtttcaactgtaggctgcactctgtaagttgcgtggcgcgtcgatggcttgaaagccacaaacaacgtgtaagcggaggattggaaaactcttccgctttggccttcaagacttggcgtcgcgacgttgggtcacttttagtagattttgcagagtgtggcctcgacagaaagcaggaaggatgggggcaagtgggaaatgtacctacacggacgcaaactccgcgacatggaccattttcgaatccattgccaattgaagtcggcacattaaacactgcgataacttttattgagcgctcgctccgatttgccatacgaatcgcggggacaggccttcgggccgctacacacgagctcgagttcgttacatgcccctctgcccctctgtcacatatgcgtcggcaagcagcgagggcacggcggcattcgagcactttcgtgcagctgctgaaggatttcgaatcaaggagacaagaggcatcaaactcgacttgagtcctgatcccagcgccacctggcctcgctgttgctctattagacaagacaagatcgcggggctgcgcgtggtacttgtgtcctcatgcttaccactgcagctgcatttgacaatttcccatccttatccgagctccaccctttggccatccgatgtacaaacagtaagatatcgtgagctctagtgcatgacacgctgtgcacacccgccactcgaacttcttgcggtgtatccatgatacacttgaagccatgatgaaatggctacatgtaagcttagccaaattagccagtttccctcccgcagccgaagcatgagcaagcgtaaacgcgatggctcagcccaagtcgccggcggctccaagcacgcgcgtgtgcgcgaaggtcaacgtgaacgagagcccgagtcggtccctcgcaggcgcaagctcaagggggttcgtctcccagtcgacatcgcggcccttgcgcacgtcttgcagcaactcgaagacctcctgctgagcccggacgaagccatgctggaggcggcggcgttcggccacgtgacatgggtacaggagcttctgggcagtttcgagtgcgagttgctggagccactgcacgttgcagccgccaacggccacgcggaagtgcttgaagcgctgctggacaagttggtgaagcccccgagcgagctagacagcggtacgtcggatgccttacagtacgcgttgatggcggctggggagcacgagcacctcgctgttctgcagctgcttgtgacgtgcttcctggctgcaggtagtacacacaagagggaacacgcagcatctacagtcactttagtgctggaggatgcagcagcacacggccaactcgccgtcgtggactttctggttacacacgcggccccgctctttatggagttcgtggatccaagcgaggaatcgcccgccttggcggccgcaataatgggttggcacgtggacgtcgcgtggtatttactggatcgggatgcggacggcgtcatctttgactttgtcactgcgttttgggtagcgctagacgccggactgaacgacttggcggacagaattgacgtctattcgctgagacgtcacgagaggactgcgctgcttctggagctggcagtcgacgatagcgtggatgccgtcaagtatattatcgacaagggagtggatttggatttggtgagcaaggcgtttaagaaggcggcgaaggctggtgccgtcgcagtcgtgcagttcttgtgaacgtcgttcgaaatctcgccggaatatttggacgaagtgttcaaaaagaccgctatttcagcagggaaagcaattcaagttctccccattctctacgaaatgaagcgcccgtccccgcggatcatctacaaaatatttcgtgatgcgcacgacgttgccgtactcaaactgttgctcgagatggagcaagtttcagatgacgcgactgttgccgcctttgaacatgcagtcgcggtcgattttcgggataaatttgcgattctcgaactgttgcactagagggagtgcatttcgcctcaagtgctcactgacgctctcgtggttgcagccacgcagggaaactctgcattcgtggacttagtgcgtggcgactctcgtattctgtgtgaggcgctggataaggctttcgtggactcggtgtttagtgaaaacggcaatcggatgaagggactgtacgacagccaacttgttttgcctgcggcgatttgtgtcgcattcatcatcgccgctgctcgaaaccaacttcaaaccgcgaccgcactcgcgaactacctacctgtcgaatcgtatgtacctcgacattttaaagacgtggcttttgtgtttgtggcaacacgggggcaactacaactcatataggcgctgaaccagaatggaaacggagagtggtcggtgagcgtgctgcaacaagccttggaggccgcgagtgacgactcaatcaggaactacattcgcatacttacctgcaacaagctcttccatcgacgtgtcccagaagcggtgatgaagttgttgacggattggagcgatgattcgtcggacgagtagcatccgctgccacactgggtttattcggattcgctcgttacatacccgattgaaggttgcggatgcaagagctgcgtcttatcacggaaaagttgaggacgaagccagagtttcccgatgtcgcaagtgtagttatagttagatctagcaggaggtagagtcgatgatagctcacttgcgaattctcctcgctccagcaacccgccacgccacgcccttgatgtggcaaaatctacatttatttgccccacacatggacattgttggaaacgagagcaatagcgaccaagcccactatggtcgcggcagccgcaaaaaccatgtcatacatgtaaccctttttaccggaggctttcaccgtttcttctccaagatgctcgatgtcgctctgggtgagagagttcgtcctcagcttgggcgcaatttctttgtatgtggaggttcttcttagcttctccaggaacccgggttgacccttgagagttgtgatcgtcttggcgaccttagggtccttgagggcatcagtgatcgacggattcgaggcaatagcgttaccgatttttgggttcttcttgaagagtgacgacagtttgctgagacccggaatcttaaatctcctttcctcggtttccgcgatgaccagactattcgtcgtctcctttctgccgtcttggagggtgcgacgcatctttccatcgcgttccgtaccattggcagcgttgatgctcgaagtaaactcgataagggccatgacaagcaccgtcacggggacggattgacgcatcgtgattcgcggacaatttgaagtcgtgggctacacttgcggctgcggaggtcaattgaaaagtgagtgtggactttacaagacatgacacaactacagattcaccctttgtgggggattcagactacgcttagcatcacatcagccagtatgcttacttatttagcattatcataaccccatgacatacagttagcatccaccgtgtcgtgatggtaagctctacctgcttagcgtcacgccatctgtgatgcaaggcctcttttcgggggccttttgttgacaactctcaaacggcaggtctctgagtgaacactggcgtcatactccaagatccatagttggtcacccagcacaaattggggcattcggggaaatatagctcatcaaacaatcttgtacgaagtgtggccatccgtctcacgccaacaggagttttgcagcggaaccccacagcatcaatggatgtgggcacaccgaacatcgccttcttggacaacagttattagctcaatgttcggttgtcaagtcggagaatcaagcattgaagtcaaagtatggggagagatttaacgtcttaatgtgcaatctggctttgcccgcacaattcgctttgattccgagttcgccgcacagctcacggctgagagcaggacgtcctccgaccacgtgagactgctgcacatatactcgagcgttttcagcctacagtggtgggcggcgcccattagagcttgcgtggccaactccgaagggatggtctgcgcgacctgcaagcttttgagtacattggctttgtcgttgcttgctgcgctcaggaaaacttccgaaaacaggtccgggggaactagtccgttgctgcacatgaagcgcatgattacttcttcacccgctgccctctatagcagtatgagacgttcgacgctgcaagctcgaatcccgctgcgatggactcgggcgaaatcgactccttctcgtgtaagaacttcaccgcctcagttgaaccaaagtaagcggcgagttcaaatgctttattcgacgtctcgacagaaatccgcccacgatctcgaaagaataccatcgtttcgacgcaattaccccgcgctgctcgaataaacgcccgattctcttcttccagagagtcatgtccgcgctcgattagatacttcaccgcattcaaatgaccctcttgcgcagcctcaccaagcatgctcgttggcgcgttacgctcgtaccaatcgccttgtacaaatcctggatacgcgcgatacaacctttccatgagtggtttgttgtcaacacggatggcattgtcgagcgcttccctgatcccagtaatattcaaacggattcagcagcacttccactatatctgcatgtccgttaataacttcagcagatagcgcgttggacctatcctttgcgaagtatcccaggatatacgggtcaatggtttcaactgaatataccaactcgaagacactgctgtgaccgtgttctgcagccaccccgagaatgtcccattctaaatcgtttcggtcttcacggtcatcaaccaactctagcagacaacgtactaggtctacgtcgccattttcggcaccaaccacagcagcaccgtaaacgttgagcatgtagctgtcgtcttcctcgagctttaccagccactgcacatcccccgtcttcacggctgccatgatcccctcctccatcgtcatcgaaaactcttgaatctgcttcacaacgtgtgacatcgcctggagttcaggtggaagtactcgaaccacgctcgcttgacagctgacttcgtcggcttgacctttttcatcttcttgttcgtcttcttcaacttctcgatcgtcttcttccagggacacatggattgtatcctccagagccttgttcattgatttgcttctgttctcttggtgttgctgctacctttggatcttggagaatgagctgttcatcaaagtctgattcatttttatcaactcaagtttttcaacccacgatgcgatactgggttgaaatcctacgatacccctgatacggatcggtacattccagggaagaccgcagctcacaaggttggtgctggtatggtaaaattattctttctcgttcgcatgacttagttccgagctacttaatttttttcccacacggtaggcaactgctcgcaaaaatatttagcctctctgctctttatgctctcgtagggtagtaccgcggactcgttccaacctgagagcggtttccgtgtaaataccgggggcatactccaagtgtaaagttggtcgcccagcaagcatcaactcccggtatactttggcttcagcactttattctcggtcttgacaaccgtacattgttgagcaacatacaccgaaaatttcctgcgtggacagcagccaaatctgtgtcatttgtttttatactgaggtattccgttgcgaaaaaactcctgtaggcatgggacgaatggtttacacttgatacaggattgtttcatgagctttatgacttagtacgtagtatttcggtgtcccactgggcgccttccaaaacacatatataaccgtttgatcagtttaatccgtaatttcttttaaattaccgaacgggttaatgtgccctaaaacggttgctggaacgcgaccttcgggaatagtggagttcagtcacctgtttaatcacgttgctagttaagagtcgcattagaattgtttgatgagaccaaaaagtggtctcatcaaacaattccccgtgattaaacttttatgcgcgacctttggtgagggttttggaaggcgcccactgcttaattcgttttgtctaactttatccgcaaaatctgctccgattccaagttcgttatgcaactcaaagctgcgagcagggcagccttcgaacaggtttcattgtcgcaaaaacactcgagagtctcccaccaactgtgctcggcggcgtccattagagctagcgtgaccaattcagaagggacaatatgcgcagcttgtaaacctttagtatttgcacctggtcattagacgcagcgctccggaaaacttccgcaaacaggctcgggggcaccggtccgttgctgcacatacagcgcatgacttctcctctctcctccctcgcatacaggccatggcagcggtgtttgctgtacagtgctgcgagcttgaatcccgctgcgatcgactcgggcgcaattgactccttcttgttgcaatatcaaattcgtgcaagcattactccggtgatatgcggccagcaagagcgacggacgcacacacgcggggaaaacatctactgcgcacgctcatttcaattcagctgagaggacaggcaacaagtgcgacggtggcctccagctagctactactacttcacagcaccaccacagaggagaccaaggggatagccctacatgtagtccgagctcacagctccagttctttctcattctcacttttacctgctaaccaacaaacaacttgagtctcctacatcgccgcagtcttcagtcgacttcctagccttccatcacttctcgtgtaagaacttcaccgcctccgttgagccaaagtaagcggcgcgttcaaacgccatattcaacgactcgaccgaaatccgtacacgatcgcgaaaaaacgccattgcttcggggtgattacccttcgctgctagtataaacgcccgactctcttcttcaattgagtcatgcccatgctccagcagatacttcaccgcattcaactgccccccttcagcagcatcaccaaggatgctggccggcgcgtcaggttcctcttcatctttttctacgaactctgggtacgcacgataaatcattaccacaattggctggttctccacacggatggcatcgtcgagcgctttcccgatatcccagtgatactcgtacgggtccagcagcaggtccaccacgtctgcatgccagttgacaacggcagcacataacgcgtcgctcctatgctttgcaagggatcccagaggctgtgtataggagtcgaccctttcaacagggcaggccaaatcgatgaccccgcaatggccatgttcagcagccgcctggagaacttcccaggcaacctcgtttcgctcttcagggtcataaatcgactccagaagacaacgtactacgtcaatgtcgccattcttggcaccaaccacagcagcgtcgcatacgttatagcagtcgtcttccatgagtttctccagccactgtacatcccccgtcctcacggcctccatgatcgcctcctccatcgtcatggaaaactcttgaatctgctgcacgacgtgttccaacgcctggagttcggatggaagcactcgaatcacgctcgcctgacagctgatttcgcttccaatcgagttggagagtgagcggttcatcaacgcctgattcattttatcaacccgtagggtgaatagttttcaacccacgacgccagattgggttgaaagcctacaaaatccctgatatgaaacaattggcgggaacccgggtacccatcgggaccccggttcccccaaaactaccggtacacatgtatgagcaaatgcattgaagtgttggtctatgacctacatagaacgcagctaaagctcagtaggggaacggaaggttaatttaccttcgccctcgtcctgtgtctctccacgaaaatccagtcgcttgcctggtgcagcggtacagtgcttcccggtctcatcgctatcctcctgctcatgaaagataaacttggacatggtaaggtatgttacttgggtctattcagtaccggtggcatattttgagggtagtccttcatcgacagcacttagatatgagggtttaacttgccccgagggtaccaatgtggaggccaaaaattaaataaataattcgcgatttggtcggtatcatttgcgggaacccgggttcccgccaattgtttcatatgaacatggtgcacactaccagaacgaatccttgacttcacaacagcctccgctctggatcaccaattctccccctccaaatttgtttgagctgcgggctgctcgtcgctttcagtgcttcattcagagtggcaagcggccagtcttcgcccttctctagcagctgaacaacagctcggtagttacttcgagctgttcggagtaactaacagcaggaccacttgcttcacggactgcgtgatctgaggtttgtccatgaggaagtagacgatacgcagatgccccatgtcagaagcattttgcaacgttgcaacgcagaacatacaactttacgggaaatgctcggatcgtcatacaaaatcgtcaccaggtcgtctagatcgtacgcggtcatcgcgaaggcggtgcaaatcacatcgagcttctgttgtggtacaagaaggcagccacagcttcgcgctcctccttcggaattgtcaagacagtcgacccgatgccgtcacgttctcaaatgcggtcgtgatgctcttcgaaggtattttctaaaaggaatttggtcacggaaaaggataacaactctcttgaacgctcgataaatccctgaagatatacaaagtgcctctcatagagaaacgtcacgatccgatccagaagttgccgcagcttcaaacgccgtataaaaaataattccagggatgcccagtcccgatctgaaagaccgtttcttgcacatgtacaagcagtgcagcgcgagctgagccaaccacggtagacacatgtctgttacattcaacaacttactcttatgtagtgtccggaacttttatccaatcgtgcaatcgaatagagtttagagcgccaacgagtcgaagtctgtacgcattttcaaatttgtcttggcacttcactacagcttctcctcccaagtgtcagtcaagctcttcgactgcatcgagtatcaaattcatcctagttgccactgtcacggccattctctgcgtatctggagtcagcgctgaaacttcctccgagcaagcacaagacgtctcgcaggaatacgtactatcacgactcgtgattcacgagcggcatttgaggtccggctaatcaagagacaagaggaaggccccctccaacatggctgcacgcgagatggagtcatggagctacttgcaacaaactttaacaacgatgcatgagttcaaaagttgacgtggcattaaaaactcataaagtggaaacgagctcgtagttaagacacgaacttaacccgaatcatttccaattatatatagaagctattttattttaacaatatattcaatacttaagtaatacgatttaaataataaattatttaaactttattaaaaatagattttaaacaaattattgtccgaatccgcaaaagaaaatgaagcttccttcttttcctaagcaagacttttcctaagcaagataaagcgcgctgctgcaacccccttcttcgacgaggacgacccagggaaggagagcaaacacgcaagatctggcgaacaagctggtgagaggatcgacccagagctcaagcgcctcaagtacgcgagcttccccatccaaatcgcatcgctgcctcacgttctcaagagcatcgacgtgttcttaatgagcccagaggaagccatattggagtctgcaaaaaccagtcacttaaaatggctacgctccctactggatgggcatggcgtaaaggttcgggacgcagccatgatcgctgcggcgagaaatggctacatcgaggcggtgagagtgttaatgcttgaaatcatcagcgcacagacgggaaaactggactatgcaagtcgccaggtcctgacaaaagctgcctctgctgctggttcaaatggtcatctggttgtggtggagttgctgttgctggaaattgaagcggacgacgagcgtgaagacaagcgtgaagaggaaagcgactatgacagtggcgatgatgagctcgctccatcacatgacgcggcgtgggaaattctcgaagaggcctgcccatggacatcttggggtcgtggagtttgcggcggagtatgcacgtgagactgagtacaagagcgcgattgaagcctgcaacgccctcaataccgccattagaggtggccattttgaggtcgtgcagtttcttctcgagcctgggcggtactggtggaattatactgaggcgcttgagctcgccattaccgaaggacaagatgctatcgcccagttgatttacgctggctctccgcagttggatgggaaaagtttgttttgtaatttcgctgttgccggcaacttgaaagtggtcacgtacctttacaacaacgggcacaatggccctgagctggtgaacgatgccttcgtgcaggcagtccgtcacggacgaaccgacgtcgttgcattcttgctgggcagtggaccgatttcaccggaggctttcgactcggcttttgaaaatgctgcagcatcaggtgttattacaaccttgaggttcctttacgagcaatgtcgcgcatcacgaccctccgtaattgcatcgtttgaaagagcaccgaacgctactattatcgagtttctcggttccaatgagagtattcctgcgacgtctgtagtcgcggcgttgaagaacgctactcgttacattggccagcactatgatagccgtggccaactggagatactcgggctcttacggaagcggacggacattcctgctaccgtcatcaacgaagtcgtcgcacaagccacgctggaatttcgccccgggattctgcaaactctgggcatcgactccagactgacacctgaagttcgttctgcagcctttgcgaaggccattgataaaggaaatctccaggcagttcaggcattgttccaagaaaatcagatttccccagaaggagtggcccaagcctttgtgagggctgctagcgctcgacacccacaccttgtgaagtttctgcaggacaaacccgtcattgacgcatccgtggagcaggacgctatactcgctgccgctcgcgcaaaccgtaacgagattacgcagcagcttttgaagcgcaaagtgaggccaattgagattctccaacgagcacttagtgctactcgtcgcaagaaactcaagaaattccttcgtgcaagcatcgcggaacggcaaggtagtttctaaaagcgagggtcgtggaccccccccccccccccccaactagggcgtttttttattcagtaaacgttcaatgcgaacagccaagaacaatatgctcagtgtagattgttcttgacaatttacattgaaaagatactgagtgaccgaccacgtgattgaagccgattgatgtaatattaagtcgagcgagtaaaagtgagtttggcattaacaaatctgttggcaactaaaaccgggcagaatgggcgtcaagagagtcaagtttgcgcgcttgctcacccaggttgcggcactttctcacgttatgaagagcatcgaggtctattcaatgagcccagtggaagccgtaatggaggcagcaaatacaagtgatttaccgtggtttcgagttctactgagcgaatacggaagtaaggtctgtggtagagccatgattactgcggccagaaatggctacgttgaagcggtcaggattctatcactggaaattattggcgcagagacctgggaactgataccatcaaattggcgagttttacgagcgaagctgaagcagccggtgctaatgatcatttggagaccgtaagtctgttgtcgttgctcgagcatgagggcaaaattcaaggatacacatggtatgattatcgcagcagtttagcatggaaagtggttgaagaggcagcagccaacgggcatctaagtgtcgtggtatttgctgccgagtatgcacacccgatatcttacgaacgagtctacaacgtcgggtcggcgttatcacttgcgacaataggtgccatattgaagtcgtgcagtttctatttggtattgttgggatcacggtgaggcactcgagccgtcgatcatggacgagatgctattgccgagttgatttacgctgcctatcacccgcatcatgtggaacgttttttgtgttatctcgttagacgaggcaacttgaaagtgatcaagtaccttttcaacaaaggtcacaagaacccatgcttgctagatgacgcatttgtcagcgcagcgatccacggacacaccgacattgtggcgtatttgttgggcagtgagctgatttcatcgaagaaatttgattcggcgtttgtcgacgcggctggatccggtgttgcagcaacctgtaggttcctgtacgagcaacatcgagtctcacggccagcacttggtagggtatttgagatactgaactattgaggttgatggatcgactgtattcctgctgtatcagttgcggtggcgttcaagaagctcgcgcgttgcggacgagattgtgctcctcaaaacggccagctcgagctacttgagcttatgtacaagaacacggaagttcctgctcaaataattaattccgtggtcgagagagtcacagcagcttcggatacagaagtttcggtggacactcgcgcgcgaattgttcaattgttgggcaatgattgccgactggtacctgacgttcggaacaaagctttagactgggtcactgacaaggggtgtatcagcatcttgcgggcttggtccaaggaaaggcagatgctatctgaagaagcgtgtagagggctcttgagagctgcttcggctggtcatttggacattgtgaagttcgtacttggccggcccggcataagtacgactgttctccgagaagctaccattgctggcgctcgcaataaccataatggtgttaccctgcggctgtgcaagcaccaacagtggccgcttgacgtactccaaggcgcgctgaacgttactcgcaacaagaggctcaaaaaattcctgcacgcgagacttctgtacgtcgggaaaactgtcactgaatacggctgaagatgaagttgaagaggatcgctactatggtaatgacagtgacagagaacttttaattttacccaatttgcttggagaattctcgaggaagcgtctgctaatggggtgagatgtgctgcagagtatacacgagagattgctttcaagccagctcacaaagtttgcgaggcggtgccccccgcgataataggcggttgctatgaggtcgtggagtttctgctcgaaacccggagatacaattgggattatgctgaagcgctcgaggtagcggtggatgctcggcgggatgcaatagcagagctgatctttgcccagtcaatgcaactcaaagatacaaatttgttacggtttttttctgagagcggcaacttgaaagttatccagtatctgtgtaggacgggtcaaagtgactttcagttagtgaccgatgcaattgtacacacagcacgtccttatcacactgatattgtggtgtttctgctgaatagtggtcagaattctttaatcattcgatttagcgtttggggacgcggccaagtatggtcttgtaacgacctggagatttctttacgatcaagcacgggtgtcacgagcatcacttgtttagggcagcggtacaattctcaagctgatgtaaatgaacgctctctttcggcaggatcggtagcggaagcgtctttaaatcttgctcgtagcaacaaggtggctgggcagtacagatttcctgataaagcacagctgtagctactttgattgatgtgcaagtgatcggagttaatgaagttttcaagcgagctaggatagcattgcacttggaaatgttcgttcccgagctattgaggcggtgggatttagtggatcttgccaacttattcaggatccgcgacccggtctttagtagtcgttagctgatagctaagtgacaataatgatcctcaattcaaaaacaaaaacaaacttattcaggatctatttcacgaaatggaactgtcttcatgcgatgcaacccaaaagctctggatagccgcctgtaagcaatttaagcgctgttaaagtcttgttgattcagcccggcatacccggagcagcttttcgaaaggccatcatgatgaacacttgtaatgaccgtaatggcgtaacgcggtgcctttccaagcaccaggggtggccgataaaagttttccgagacgtgctgagagttactcgcctcaaacggcttaaaaagttcctgcgaacaatcattgctcttcgtcagacggtaaccactgaagcacaatgaaggcctggaatcggtttgatctaacatatttaatgttgttttaatgttcggaagtgaggtgatggcatctgcaaaaaaccgtagtgacgaattacgtctaaattgtaaatatctttattcggcttgaccggggttggcgggccttgcggcccgccagccgccgcgcggccccgccgcccgccaccagccgccagctaggaatagatctaagaaaagttgcacctactggtagtaaaaaaaatggcagcgagtgcggctcgtgctgcaatacgagatgcgatcgcaacgaagagctttcctcctgcaatagcgtaccccgagaagcagaggaacgcaatgctatcggcttggttcaacctgcctacgatcacgtgggttccagacgtgttgaatgcaggtcgatctcctgtttgtaccacagaaggatgtaagtgcacgccgaaggtaaaggaatatctgcagcgaactgtccatgatgtcgaacacaaaaccattttgtattatgcaaggtacaagtgctctacaggacgatcgttctctacaattgatgatgcttacctttcttcatcgaaagccgtattccttgcattcctgtatttgttgacttaccagaccgcaatctcgttagatttatttgagctagtgtatgacagcatgcttacaaccaagggactggcgggggctacagacaacgtaacgcggcgccgtcagaagcgctattatgctttgttggctcgtgcaggttgcgagattgagaaacgaaaagctgcggatactgcttatgcaccaccactcttgcaatcggtcgagcagtacatgactaaccatatttgtctagacagcgaggcgctgcaaaaggtatggctctcacaaacggaagtgtgtagtaggttactcgaagcccaaatggccgtctcacaatgcgaaaaggttatcagagtagatcactctcaaaaattctgtagcaagttgaaagttttcggatctgacggaagcaaagagcaagcttcgagtgtgcgtatgttgcttcttgtacagaacgaaataggacaagtagttgcaagaggtctaacgcgttccgagaaccatgaagaaacagaagctattttacagtgtgttgctgataagctagcggcccacccagcagagaagcgattctgtgtgtgtgaccacgctaatgggatgcgcagccttataaaaaaactctttggagattcggtcgccgtgaaacaggacccttttcacgtcattcagagactcgcggaaacaatttccgatcaagctcagcgaggctggctcgcgaagcgactttcggcagcaatctacgacgtagaaagaaaaattctatcgccaagtgcaacagcagaaaattttgcggaagctgcctctagtgtgccaacatcaagtattcgtgtctctaccagcgaatgggagggctgtgtcaacagcaatctcgagcagattaggcaaggagacctttttgttgaggggagcgactacagtgaaggtggcagtacggtgcgagtggtgtctacaagtcaacttgaagcgattcattcaaagttgagaaaacttctggatcgggtgctttcgatcgaggttgggctgcgtatcctggatatcttcctgttacaggttagttttcttgcaggagattttttttactggacggtatgttaaccctttcattatggttgtgatactagcataatgtcaaggtcggagccaagtttaggcggaatcctgaatttaatgcggttgacttcataacactgagtcgcagtgctgtcttatgccgtgtcattgttcctgattcgcctcagctagagtacgtcaacgtactgctagcaactcgtccaggcccggttagcttgcggcacaagtatagacccggtggcggggaggctcctgttcaccgcccatgggaagcactttacgacatgatcccacttcaagcagagcgagcagaaggaaccttgctacaagatgacacaacacagaccgatattcagaagctgctgtttgcttcaaggcatggacgtaatgagctgagtcaacaagattttgtcgaaaaccttggtttggaagctgaatatgacaatcccgcagagttttcagctcacgagtttgccctgctaaagttactgcgtgcagaacagcttgcggctaagattgctaagtgggaatcctacgaagttgtcgctacgatactatacaacactgctgtcagacggctcgacaaccccaacctggacatgaagaaacgaggcttccgtgccattgctcgccgacttcctgtaatcgactcgcaacttaagcagccttcagtgaaggtggtatccagtggctctcgcatgctcgtattgaaaggatccactaagctcgatgatgaaaccaatttgccgaaagaaaaggctctgcaggaagaactgttccagctacttcgattaccggtcggtattaagcacgtcaagcaagtctaccgctccgtgtacgattttgccgcctacacatgctcgggaattaatcagaagagtgatgaatttctagagcgacgctgggattctttgcgccggtccgtaagctacaagcgtcgcagagatgaaggtgtcgaactcaacacttcttcgtgtagctccatccaacctccaaacgccgccgtagaggcactcgcgcaagctccgttcacagacaataaagtatctcgtccaccgaaacctcttgcaccggtagatgcttctacacagcagctacaatttggcatggcggtatgtgtgtcagttccagcgaccaaccccagtaattcaagtagccaagaagctccacactcaccaaaaagaagtcggtttgaaattctggacgaaaccactctagatgttctgctggagcacgcggctagttttcgaaaaggggctcacggaaagtggccgagtatcgtcgcaaaatatcagcagatgcacccgtccggaagcttggatttgaacaaacttcgttgtcgactcaatgcagagcgcaaacggcgcgcagggttacaggcagcagaaggcaacagcgtgccaacagcagcaccggtatccgggagtgtatcttcaaacccagcacctgtaccacctgcatttgtacacagtcaaacgctcaacagtgcacggccaacaggcccagcgtgcgcaagctgcaacaaacgaaagcgtggatgtggacccaacagcaccaatccgaactgcatgcaccgccaatcagcaccaatgcagtctattaccagtttcttttcatgctgaataaatccgcttgccaccagctaaacgtctacatcaatatacaacacgtagtagtatcttagtaattagcacaccccacaacgcatttgaaattgagtatgtaccttcacatagcacgagttggagtcgataagaacgccggcgaagtgaacctcaatcgtctacggtacgttggcttccatgagcttgcctgcgctttgcgccagcttcgacgccagagtcgccgaaaccatatcgacgcgagtagatctagtgcaacagtgatgcaggatgcctagcacgatcaaggcctcgcccctgttcttgttagccacagcactagtcagagtagaggccgcagcagctctgagcagccccttgatacggctagctgtggtaagtctgtcccgctcagtagtcggcttcacatcaccactagagtctgccgccatatcagcaccagcaaatcgaatagttaagaacataggtcaccgcatacatctcattaggatctgcagcactttcatgcaccgtccgagcttgcgggcccgcagtgcctcggcgagattgctgaatgttgtctcctattggctgttatatttgtcgggggtcccaggacagatgtcaggacatggtggtttttggtggtttttggtggcagttggtggcttttggtcccaggataatcccgacaataccggtcaagccccccccccccctttattcttgtggacttcgctcagctttcgggcggaagtttttgatcaactgttcgaaaatacatgcacttccggatggaaaaggagcgagataataccaactctctaccggataaagcgcccgtctccacaggttatcgacagcgttttccgtgtcacttgccgtgctcaggctattgctcgagaacgagcaagtatcagatgacgctatcgtcgctgccttcgggcttgccgctaggggcatttccgatctcggtttgccatcctccaactgttgtacaagaggtccattccgtctcgagtgctcactgagacgcttctggctgcggccacccagagcgatactaaagtcgtggaattattgcgtggcgactgtcgtatttcgtccgaagtactggatcgagcttttatggactcgactcttagccgaagtggcagtcggatcaagaagctgtgcgacagtcagcttgtttcacctgacgtaatttccaaggccttctgcaccgctgttcgaagcaatcaaccacagaatgtggcgatactcgcgaattgcttgttggtggagacgtatgtacctcgtcattttaaggactctgcgctggtgtttgctgcaaaacatgggcaactgcaagcggttgagacactgaacaaaaacgaacagggagagtggtcgctcagcgtactgcaggaagcgctggaggtcgcgagaaacaaccccgtcagaaactacattcgcaccattacctgcaaccaactcttcaatcgacgtgcctcaggacgcctcgaagcggtgatgaagtgcttggcgggttggaacgaagaatcgaagtccaagtaggatgcgcgtacacgctaattctcttctaacgtgttgtggtcagctctttgcttcccaatccgggttgcggcatgcccaataaccatgccatacatgcaaccttattttttttaggaggatccttctcggtgataccttacggccttctgttcggcttcagtttaggtgcaaattgagtgcgatcgatgcctattgaatggaagctgatgaagaaatgagagcgaaacttgcggagctcatttactcgagattcccgaggcaaaagtttcttctaccatcttgtcaccaacggcatttgggatacctgtaccacatgggtgatagaacatactttttggtggacacatcgaaattgtgattttttgcactatcgcggcccaatttggcgtttgaaggcgcggttttcgaagaagttggggtttcctttccaaacaacaccgcgcttcacgatcgtcacttgccaaagcgctagaaactacccaaagatctgaaattgtcgagttgctcctttccaacggcacttctactacgaatttagtcgtggcggcgtatgaacacgctgttcgacgtgcctacactggtgatcagtgtctacgctcgagatgtggtgcgctgggagatgctcgggctctttctaaagcggactgatattcctgccaaagccatgagtgaagttgctaagcgaactacgagcggaagttaaacaagcacgcccgaggctgggcaccctgcgctgcatgaatgaacctgctttgtattctcgcgtttcttggctctagtgtgctgcaggcgcgatagcacgagcgatgcagtgttagcggctcaaacacttctccttcttcaatccgccacgaaacagtactcgaaaactagctccttgtgttggcgtacacagatttccgccggatctttttgattccgcggaagtgaccagcaacaagcgtccgacctcaagagccccatgcccgacgcctctccaagctccaagagaagccgaacagggcccgatccgcagcctcctccagcgtcgaagcgtgctcgcacgtctccaacggcggccgaggagtacgagcggctcaaggacgcgacgtttcccgttggaatcacggcgctgccgcacgttatgaagcagatcgaccgcctgctgatgacgccggaggaggcacttgtagacgcggcagccactgccgacatggagtggctcagctctctcctgcgcaagtccaactgtgctgcaggccgagcgctcgtggcggccgcctccagaggccacgctcttgttctggtgaagctcatgcgggcaatctctgacggcgatcgagatgggggcgaggacccactgacgatgatgctggaggctgccacagctgcagctgggggcggacacctcaaggtggtgctggcgctgctgcgatttgtcgagcgtcgaagcggccgagacagtgaaaaacgcacaggggctgcgagatctttgaaggaagcggcggcgaacggacacctggacgtggtcaagtttatggtcaagcacgcgaggaagaagcgatatacgaatgcgacaaagtttggggcacggacactgtctgtcgccattgctggaggccaccagcacgtcgttgagtatttgctaaaagtgactgaggttcggtgggatttggctggtgcgtttgcagctgcagtggatacgaagcaaattgaactggtgcgcaggatcggggagatgtacccgaagctctttccaggccacaacctcttcgttcatttggcacgcgacggacatctgagtggagtcaagcatatctacgagagagggtataagttcatcaaggcgatcaacaacgccttcttccgcgcggcactgcatgggaagacaagtgtggttgaatttctgcttggtactggccacattgggcctgaaacattcgacaagggcttcgaaggtgctgcggggacgacgggaggaactcaactggagacgactctcttcctctactacacgcaccgtgcgtcgtcacaatcgctgaacaaagtgtttgaggtcacggacagcgtcgaggtgatccagcgactgtatgagaacgaggatatctccagtgatgcgatcgtcgctgctttcaagcgggctgctgactgcggcaacagtatccacgctcacaagtcgggtcagcctgaaatcgccatcctgttgtttgaggacggctgcattcccctggagacgattaacgaggcattcgtgattgcagctcagaatggacacgatgatgttgtggagtgtatgcgcaaggatcgtcggatttcttcaaagtcgataggtgaagccttcgcggccgctgtggggcgtggaaacagtgcgttgatggagagtctttatgaagctaagcgcgtttcccccgatgcgatcttccaagcttttgagaaggctccagctcacggggatcgcgccatcatttcgtaccttgtgaagcttctttcggaagagcgtgtaccacgagcgatcaagtacaaggcattcgtcagtgctgccaggcgcagcaaatacacttacatgctggaggtgctcagcactaactttggagaatggccgctggacgttctgaaggaagcccacgaagctgcgctgtactgcgcgccccggaattacatctccaagctgacttgcgaccagctatttaactccaagaacgaagagagactgaaggctatggtcaagtggatggaaaagtggccacgcagtgcaacgaaaaagtaagatcaagctggggtgtctctgttgactgccgttgtatcgttgctatcctgttcgggattttgcctgaagatgttcacagttagccacgcaaaaaaattaatgatcgcgcaaggtgtgagtcttcggtggccttgactcgttatcgacatcgtccgaagcacttgaaaactattggcgctattcagagcagtgccgatgtgtatccatgaagtgaataccgggctttgttgcgatgcgaaaagacttgcgtaattcctagcaggaatccatcggtcctactaacacttcaacaccttcagcgccactggaaatgaagcgcccaccctcgcctccacgtcaacacaaccccgtcaacgagaccaagcatcgcaggacagcagacgcagacgacgcaatgtatagcccagcgctcaagcgactgaagtttgcgcgcttcccgatgcaaatcgcgtcgctcccccacggtctcaagagtatcgacacgctgttgatgaccccagcagaggccatagtggaggctgcgaacacgagtcagttgaaatggctgcgctctcgactagatcagcacgactccaaggttcggaatgaagccatgatcgctgcggccagtgatggctacatcactgcagtgagagtgctgacgctggaagtcatcggtgcaacaaccgaaaagctggatcctgcgtgtcgtcaagttccgacggatgcagcagctgctgccgctaggaatggccatttgattgtggtggagttgctgctgctcgaaattgttgctgacaagagtgccgaattccttgaggaagacgagtctggctcgggcagcgttcctacccatgatgcggcctggaatcgaaaaagcatccggtggtgggcatcttgaagtggtgaaatctgctgcacagtatgcgcaccagaggggccgtaggcaagccgtcgaggtctgtcaggcattgccacttgcgactataggcggccactttgaggtcgtgcggtttctactggaacccggtcggtactattgggattgcgctaacgcactcgagctagccatcgacaacagacaagacgatatggctgagttgatttacgctgctactccagattttgaaggagagagctttttttcgtgcttagtgtacgaaaataagatgaaggcgtgatgcctttgtgcaggcggaagcatcgacattgtggcgttcttgctgagcagcgggccaattttgcctgaggtattcaaatccgcctttgaatgcgcggcagcaactggtgcggtagccaccttgcggttcctatatgatcaacaacgggtgctgtgcaacgacagcatttgtaagagctgacggagcggctactatggagtttatccaaggagagaatccccgctgcattagtcgtggcagctttcaaacgcgctgcctatggcaactactccgctccctatgctaatggggtgtactatcaccccacgactgaccaactagagattcttgggctcttacggaagctgatacctgccaaaatcgtcaatcaagtggtagcaaacgctacagcgggttttatcccgggaattctgcgagttctgggctgtgaccgtcgccttacaactgaagtgcgatcggcagcttttacgaaggccgtcgataagggacctcttcaactgatctggccgctgttcaaaaagaaccaggtttcctccaaggaagcgagacgagcattcgtaaaggggcctgcgtcggatatctgggcactatgcagtttttgctggcaaagcacgtcatacctccatccactgagtgggaagctattatcgcggccgctcgcacaaatcacaatgaggttgcccagtacctatgcaagcgtcaagagtgcccggtcgaggtactccaagaaggattgagtgcgactcgtcacaggacgctcaagaattccttcacgcaaccattactcgatatcaggggtcgcccttgaagatgaatcgaacgtgactttcctgacgatgcctaggcaaggtgggtcagttcatttttgtatatttttcgaggggtatttgacttatgatgttccctttggcgccacagaatgccgtacaagcaagccaatgctacgccaactcctggatcattaagaaagatggtgcttacatatccatttttaagaggattgatatggcaacttggggaataatgagttcaggagatgaggggttaccgcgtacgagaactgcggtttatcttggggctctgattgaaaacagggagtgcagtagtaagataaagcgtgcgtgagaaggcaactactgagactcaacacgcgccttaagccgaggtgcatgaacagatcatgatataattgtcagatatccgagataacctgatgatttctgcttttttaattaagttaacccctccagcgcgagcgatctgagttcccaccgttggccgaaaccctatacacgatattgatttatctcatgctgggtacatatagtggagtccacactattataaacgtgtatatcccaaagccggtccatgcacctaaccccaacttgccaactcagccactaatgtgtatcacagtacaaaaacagcgcagtcgtaaggccaaatattttttcgatatttagagaatcaagtcagatggcaatcagcaagaccagtgcatactcaaattaagtcaaataaaaagccagaagagctgctgcacacactacattgcgtttcgtcgagcacgcttgtgctgctgaatcgcgcgcgcactcccatcagacgcggcatcgctgtcactactgccgccgtcacttgcggccgccgctgtggccgccggcttccgagcgcgaatcttgcgcttggtaatggacggcgggatcaaggtaccgttcttccagtgtcggtgccaaatctcgaggcacggaacaacctcaccattacttgtgtgcttgactttgttgcacaggaacactcgtgcagtctgagcgttttttgccgccgtcttgagcttgccgccaccgcagtagaacgttgtcttgcctcctctcgcctcgccagcgcgcttgagcaccgagcacaccttgcaggcacgctggcgtcgctttctcgtgtcgtccgtgttgcccttcctccactcgtcgatttgtacgggtacatgagttgttgtagccttgcgttgcttcgatggtgtagggtgcatgccgcggtggcgcagcatttgggtccagtcggcaggcttcagctggatcagctccaaatgaagcttcttcaggaactctacgtgcgtagctttgcgtttgccatccatggtgcagcgccagttgtacacaatgaaagcattgatgatagcgagatcaatcagacccaggaacaatgactagtagtatttcttgtagcgtctggctttttgaagagagtatctgtaataaagcagtatgatacacgataatcagtattgataaaactgtacatacacgatacaagcactttacctctggagtcgaagctggtcatgtacgtccacgccgcccatgtacgtttgatagtccttcactacggcgcgatggtcactacggcgcgatggtgctggtgatcagcaaaccaataaagacacacaattctctgcccgagatatcctttgtagtttgcacaaactcctttatttgttgcggcgtctgaacttgaaaatcagggtgtttctcctttcctttttgctgcttggcgtactgggcagctgctcgcaggtccaggttgtccttgaagtagtcatcacttgctccagcaatagcttcccacaagtgcggcggtacaaagcgaaagaaagctcccgacggtgtcaacgccgcagcaattgcatcggctgtaggtccgtgttctccttcatagatgtttgggtaggcttctttaatccagccgtccggtcgcgcgttgtacggctggtgcatgtacgggtagggagtcacatacgtcggttccgtccatccattgaacttcatatccaccagaacgtccttgggcacgctgccgtgggcaatctttgacaaccctcccgcggtttcgagcagtgagggattgaaatggagatccgaggccgaagctgacacctccgcagccggttccgtgagcgccaattcttcgtcatcgccgaacacagaggttgttccattctcctcatctgaatccaatactgtgtagtcgtcaacgacttccccaggctgcatgatgtttggatcatctgtatgttacacgatagaagtcagtaaaacgtatcggtatcgtgtatgtacgtgtatgtacacaataaacttaccaacagaaactggtgtgtcttctttggtttcctcatcctcgttcatttcgctttcctctttcgattcttcttcaacttcctgttccatactccccgacggctcgtactcgctattaggtgcatcgcactggccaaaatccgagcgaaggtttcgcgttggcgtttgaggagaagcggttgctgcaaaacagatacgacaaacgcagagagtcaacaccaaattgacgcctttcagtgatacttcattgccttacctggtgaagccgataatgcagggcttgacacgtggctactggcctcggacccgagatgaggagacgtagagatcagatcggcaacgcggctggaacttggggtaccctcacctgagttgagtgtacaatacacgtttgggttagccaaatagcttgtagaatacaagttatcattcgttaccttgcgactgaggaggctgggcgtccgcagcatccgatccagcgtcctgctcatcgctgcatgtaccaggttcagcgtcttcaacgtggggagaggttgggatgagcggttcggcagcagctttgcctgtatcgtacacgatagagtcagctctaggtcgtatccaatacacgttacccaaattggttaccttgttggacttcgtcaacatcatctctcgggcagtcgcgctggccacttgcttgatgcgctgcaatcgtttcgtcggggccatcgccttcggcttgtccgttctgagcagcaatcgcgtcctcgtaggctcggcgctccattcttctcttctcctccattgccactattagccacaagagaaaagatgtcgtcaaacttgagttataacaaaatacggggatcgcgaaacgtaccacgatcacaatggtccagatacttcattagcgcttctgcgccgacgaaaaagtcttcattctcgacatcgttcttggttttacgggattaatgtaggtgtgtcgactgagagtcccgcaggcttctttgaggtccatccggccgcacggaaaaccatcgtgtcgttggttgcgtgtcgggcggtaaacgtgcggtagcgcgagatctgtgcggcgtagagctgttgtagttagcttaacctgcccttaactttctaacctctacttgcttaacttaccccctccttaccagcccctaactcaccctctactttgtttatgtggtccacccttgttcatcatccaatacaaaaccctatataaacgtatagtccaatcaagcgcctcgcagtgtcctgggtggatgttcatggtcacactcgtcaccttcctcgtagattcgcgctctgcgccgccacttgcagcgccacatgtataactaactcggcggcgagctaccagtggaatttcgcgactaccagctccgtcctccagcatgcagacctcacgttcgagctccctcccccatcgttggtgccgccatcacggctgtgtacgctacggagccgtggaacatgggctgtattcagcgcagcttgctgtcgaactgcgtggctaggccaagacaactgcgctgctgccacggacgtcggcgtcttcctactgagctcgcttcgccctgcagcgcatgctgattggtttgcagtcacgcgacagcgtcaactacattaaccagatcaacaagcaggccgattcggccttccagtgcaagacgaccgtgggcaaccagaccgtcgccttcgccaacctgctcccggacattgtcggagacaatgccggagacaagacgggcaacaatatcaaggatgttgcgggcggctcggatatcatgcccgcactccagcagcgcctccgcctcgggcagcggcagcggatcggtctctctcagcaagttcgtcccaaacaacgaggagacggacagagcagcttgggctcgacagcagataaggcggctgccttggcggcatctgggctattataatcgacactcttctccctctgcttgctggcgatggtgttgccgctcgcgatcattagccgagcgcgtgcttcatgtcgctgagcaatatagattgtcaccactaatacactgacaaacgtgtacacataaggtgacatgtattaggatcgactcgtttttgaatgtactagcgcttccgcccgacccagaggtgtactttcatcactagccgtgcatcgtcctcgagtgttatcgctgctaggcacccccacgcttcgctcgtttagaattttcagcgataaacactaggtcccgcaccagctccggcgtcaacgagctccttttggcagtgatgatgttgccactggtggaaaatgctctttcggaagggacactggtcgccacagctcctaaccacttccttgccaggcgactgagattaggatgttgcttcgatttcctgcccaccacgccaacggatccaccttgcctaccttactaagcgcgcgggccgaagccaagtagctttcaatctcttgagcgcaggccttccttagaggtgtttgactcgagtcatcaggagtagctttcaacacgaattgagtaaagaaatccatcttgtcaggatctggtgatacagccgaaatagagctctgcggtggtggtgattgcagctcggccacctcaaccgcagcatcgagaaaatccgcgtgagcttttgctcggttttcgtctgtcaagtggctcattgacattgccattcgtgggtccaaaaatgcaatccagacgagctttgaggttttgagggcatcaaagcgctccgtgaacaaccgtcgcattgccgcttgacattctagcattaagacccggacttcgtcgacataggcttccttaccaacagcacttagaatgttgtcaaatagttctcggttgcgaaggacgccttccagcgcatcaagagcgggcaggaccacaggaagtgtcggatacaactgtccgcccaggtttcttgacaccgactcaaatgggctcaacaatacacaaaggcatcggatagccaaccactgcttgtgtgttggcttcgatagctttttgtgcattccatcaaattccactcgcccctcgtaagtgaacaaatgctcgaaaaatttgtcaagcgctggctccagtcgaatgcaccgttcaagcattgtccagcaggaattccaacgcgtcgggcagtcgacgaccagatttatgacatcgcccggtttaatgcggaggtgtttcttctgattacatctagacggttgtacgcttttggtgactttcggaagtatgccgacagagtccgacacgcttgcacaacctcgcgcatagactctagctccgttttctccaggttcaaaagtgtttcggccagaaatgcatccaactcatcgatagcattttcacgaagaatctccatgtccgctcgttcatcctcattcaggttgtcatcttctttgttctcattctctagcgcacctggctcttgcgcaaccaccgactcccacgctggtcttgaattctgcggcgactctttcttcttcttcttcttcttcttcttcttcttcttcttcttcttcttggacaaggcgcccaatagtactaagtgaagctcatgcgccaaacacggggcgtgctcgacgccaaaactgtcaccagcagctaccatgttagaccccgaatcatggacaaatcgagtacaatactctttacgaagcctccacacctccattatctcctccaacgccaaccaaatcgctgcagcatcatgtttcccaggcagctcgcgtacttccagcgtccagcttcgcacctcaaatgactcggtcaaatagtggacagtaaatgcaaagtaacttcgcgggttcctcgaagtccaaatatcgcacgtaattgaaaaatattcgcacgactgctcgatgtcggcgcacacgaaaaccccatttggtcggccaccgagatgatacacctacgcaattgagcacgcttgggaattgccatgcgaacaccacacaacttttcagtgataaacgcaatgaactcgagaaagccttcatcttcgacaataatcagcgggcgaaagtgcgctgcaaccctagcatattcagatgcttctgctcatccggactgatctctcgaagcgtagccgcttccgtgagttcttcatcgagattgcgttggactggttgctcattttcgccacggatgaactcgtttagctcacgaagatggtaccgctccatgtgctgcgcaaccttgtgttgagacgttttaaacgctattgtcattttgcaacgggtgcaaaaagcaaaggcggcgtgcttgttttcgagctcggcgtctgcaaagtaccaatgatcaggatgagtggctagtcgaacgaattgccacagttcgtgccgacgctggcgtcttgttgtgaacaatcgtggtggagcagtgcttagacgagtgccaggatcggggacttctctgtgaagcgctgcaagatccgaacgtgggtctcggtcgcttggcggctcggtcggctcagtagggcggcgtttctggctggaagttcgtcttgtacttgaacgtgctgatcgctgttgcttgtgctggcggacactcgattggtgcgtgctggaagggtttgctcgcttttgcttccgaacacgagctgaagtacgtctcgagctctgcacagagcgccctgcacttacaggggtagcaggaggtttctgtgtattggcgtcttgggcaaagccatcttgacccggagctagctcttggccatgtctcggagactgtggaccatgcacttgggtggcgtcggtctccgttgtgggctcttgaagctcctggctatctggtggagcggggcttgcacgacgaagcgcttcagcttccatctcgaagtgccgtgtgctcgaagagctacaaatcgtttgtacttaggttttgtatggggtaagtaaaggttgagtaaacaggtagttgaaggcaggttagggcagtacaccctcacgttataaacacaagttgttagaaaagttaaggattactttcgcgacagctctagtgcggcggcgcgggattttctgaagtgaggccagaatggatggcgtgcgcaaacaccttcacatacttatactgatttgctgagcacgctgagtacctctggcatcttatttttacgaaatacgaagttcaagtgccgcgcacgactatgcaggctgatcgggaaaggatggggcatatacctacccccggttgacttcaactttgtatgagcctatacaaagacgaagtgaaaattccttaacgtgtctaatacaggataagcattttgtcgaatcgtgtctaatacaggctctcgcgcgggggggggggggtaattaaaactgaaagtttgcactcttggtgctccactagcagctgcatcggtcttgttagcgcctctttatcactgcagcctcggcgctaggtcaccaattctctccctcaaaaattgtttcagccgcgggctgctcgtcaatttcagtgcttcattcaaagtggcaagtggccagtcttcgcccttctccagcagctgaacaacagctcggtagttactccgagctgcgaacagcagggccacttgcttcacggactgcgtgatctcaggtttgtctatgaggaagtggacgatacgcagatgccccaagcctgacgcattttgcaaggcagcactcacaacttcacgtgaaatgctcgggtcgtcgtagagaatcgtcaccaggtcgtctagatcgtacgcagtcatcgcgaagacggtgcagatcacgtccgggggcatcgcgctccggttgtggtacaagaaggcagccacagcttcgcgctgagtgtcgatccgatgccggtcacgttctcaaacgcgctcgtaatgctcttcgcggctatttttccttcttggtggtgctatggcggagccaagctgtgttttgctgaaacgtgaagacgcgagaatcgcgagatcttgctcttcagctcgtacgaacagtcgaacaacgccagccgcacgatctttcgcgaacgggccgcattcgagccgcacgatcattttaagattcgcctccggtcgcacaagtcccgaagaccccgcatcgccgacgttaccttctctcatgcgcacgcaggcaccgctgatacttgcacggccggaggatttcctgccaacatcgttgtgaagcctgaccagcacgtttacgtgcgagtgctccggacccggcccgaccatgctgtcgttcaagcgtttcgcgactcctcgcgccacggccaagtccgtctcaatgctctccaagatcgtctggtgcccgaagaagacgccaatacggcgacgggcgaacttctacgcaacgcggcacttacgtctatggtcatgtccagacctatcaaggcaagtcggtcaacgtacgtcatggcgacagcgtcagccgaatggcagcctcccgcctcgacgagatcgctcctgttacctgcctcctgatgcagaattcagcaatcaaaacggcggacacaacacgagcggcgcttcgagacttcaacgtcactgagctcgaccgagttctcggcaccgatgggagtgatggctccagagatgttgctgccattttgaacggagtcttgcctcgtaatcaacaaccggatgggtccgaatcgcgcacctggaccgacccgactacaggaaagatggctacatttagtctgcagcatgcggtggactacgcgtactacgtcgatggcaacaggcctatccccacaatgcggcaactgagccttggtaccggtttcactgacgatcccgcttaccgtgaaactgtcgctcaagatgccaatgtgcaagatcccggggatcaacttccaacacgtcgatccgtacctcgctccgacgatcgaacccgaactcgaactcgaaatcgaaatcgaactcaacctcgcactcgaactcgtgactcgtcactccatttcgatcccatcgcttctcccactgagaattcagcgctcactgcgctactctcagagctcgagggagacgatgcagtcgtggatgacgctgtcgaaaacgtcctcgagcgccccacgccaccgtcatcgtcgggttcatcgcgggagcttcaatcagaactcttagcaactctggcggctaacccacgtgcgttggcatacttcatttcagagtacctagatcgaaacaagcggccagccgagagcgccgacatcaactctcgcccaacccaacgccgtgcgccaggagtcgagccggccatgccatcggccattgacgctctggagagatctcaagcagggacaaactttcgacctacaagcttgcaacaagccgtacatgggctcatcgtccatcccgactatgccggtaagacaccctcagaaataatgcagctaatgctgtcatcgtctgctgcaggtataacaccccacccagctatcctgttgaagcttttcgatttcgcgtttggcattcgtggtctctctttggctcacctggagcggttcgacctgactgcgcagcgcaagtggcgtcgacaaggtgtcaacatgaacaattttgcggccagtgtcgatctacctcgctctcgctgtctgacgacgatggcggagctgttcgaagcgttctcgctccttcaggccttcgcgctgaagttctacaacgctgcgactcaggaatttattaccgctgccatgagttttgcagcaaccatcacgggtatgggcctgtggaatgcgtcggcggtggatctcatcacgttttggtttgatggtgtcctcgatgaatatcgtcgggcagtcgaagacctggcggtgtcgggtgttgataaccggggacgcgttcgacagcgactcgccatgaacgaccctgatttcatcagcactattcatctcgtccacacggaagcaaatgcaactgcacttaaagaatcagtacgtcaggatcgtaccgtgactaggcgcagcggcagtgattctaaacgcagtcatgtccctcaagacgttctcgcggcactaccgatgcagaatggaaatccgtgtgcctcaagtttttaagccagtctggttgctctccccgctccccagaacgttgttcttccggtcgcgcccatttcgttgcagagaagctcgaacccgtggtgcgtcagtacattatcgagagcatgggcggccttcggcgagacatgccccaagatcaatgactcccaatggctatctttcctcacggcgagtttgcaattactactgctatcgttcaacaggtgagagaaacactagaaacatcgttgcagaacgaggagcagaaacgccgagaccagctgaattcactcttcagggaagcaggcatccagcttccgtgctgcgctacacgacggacttcacacatgggtgtatctccggctcagatcgaccgggaactacaacgtgcagtttcggagcttacgcgtcgagaacatctttcactcgtgcagttagtacggatctggcgaaacgagacagccgaagacagcaggcctaataaggcactggatatggaatggtcagccgtactttcgagagggtatcgccatcacgaagtcctccttcacactgttcgacatggcgttcgtcaccgttttcgtcaatgtctcgatgatttcttctctgaggttccagaaaatcacaagtctgctggcgatgcggtcaacgcacttcggcggagcattcgtgacggccaggatgctgggacgtatctggttgttgacacggatgtatctcagcgttgacccaccgtcaaatttagcccgttcggatgtgtacctaaaaccggtcttgaccctcaattcgaagcccgactcatccacgacctatctcatccaaagaggagatcgacgaacgcagcatcggaccgctcgcaactcccgactatactctacgtccacgttcgagccatcgcccgtcgaattgaatatctacgcaagcgctacccaaaccggcggatcatgatgttaaagggcgacgtgaagagtgcttttcgacagataatgctggcagcagaaattgttcggtggttctgtggcaaatttcccgaggataacgcggctgtaatcgatacagcgcttccgtttggctggacaggatcgcccggccattacggagtttttggaggcgccatttcgcatcgcttggggttagaaagccctggtagccttgatccacggtcatcggacaaggaaacgttctttgcttatgaatgggttgatgatcacatttgcgtcgagcccgagatcgataatcggctcgagctctgcgaggcagctctccgtctggcgatgatggcgtttctcggtccgagatcaattaacgattcgaagttctcgcgttgggagcagcagctgatagctcttgggctcgagtggaatacgcaggaaggtactgtctccatgccggaagccaagatagagaaagctctcggacgcatacgtgcaattctggaattcaacgcggcatcaaaacatcagttgaacaagcttttgggcagcctgcggcgcgtgtgttcctgcatccactccgctaaagtattctatcagtgtgtggtaaccctgtggcgtcagatgccaccgcacgggtcgaaggtcctaagtgccggcgctcggctagatctactctggtttgaacaccttgtatcggttggtcggcctcgatcagtaccgacagcttctttggggatctgccggaacctatcgtctatctctacatggatgcgagtgacacaggattatgcgtgcttcatcccgctcgtcgttaattcctacgagtccaatttgatacgatcgaacaagacatgatacagaagtgcaaagccgctgcagtcgtctcggatgcgcatttcacgattaatgttcgcgcgcaattgagcgttgttttggcggctcttgtgtagggtgctgaatggagtccaacaaatgatcgtggtctctctcacgtgaagtgcatcatcgacaaccagtctgcggtatcatggtgcaacaaacaggcaagttctaatccgttctcgcaagagctgaaccgtgtgctcggggcggtcgaagcccaacacggcattcgagtatcggccgatcatctcgcaggagcccgaaatacgttggccgatttggaatctcgcgcctgggtggggtccagcctcgatcagttttctaacctcgttgctatgtggcaggaacgagaagtcccgcagaaaattcggaggatctacgatccacgttattcgcgcttcagctccggtccctggcagattcgtcgcagcgaacctatcggtcctcatcgcaacagtggtgtcaatatcggcgctctcgacaactcccgatctggctacctcgaaatgaccccgatgagcaatcactacagctgactctcttcgcagtgcaatgctggcgcacaagtggcattggattcgccaccattcaatcaaagcttagccatgtcggctggtatcattgcatcaaatatggcaccagacccaagctcaacgacggacaccacctcgcgcttcggggactccgacggacagctagcgcgtcacgacctcgcgcccccgtcagtcaacaactcctcgttgcattcagcaacctcgtcgactttggcaacccacaacaccgcgtgctttttggggctacggtgctgggcttttactttctcctccgacgctcggaatacctaatatgcgatggtcgccgatatccgtattgcctcgaagttcgggatgtcaaggttgctgacggtgaaggccgcacgacgttaaactaccaagcagcagcttctgtccagattcagtttcggggaagcaagaatgaccagtaccgccaaggaactgcaagaatgctacaaaaagcatctcgtccaccgatttgccctgtatttggtgccatctggctgatgaagaacgccgcagatctcgatctgtcccctgagaagccgctctgttcattatcaaactcctggatggtttcggcaaagatgatgaatgcagcacttcagctagccgctcaacatgttggccacgaccagcgtctgtatactacgcactcgctcagaattagaggagcgacagcattattccacggtggagctgagccaacggcaatcgagtatcacgggcgatggcgatctgaagcttatcgccgatacacacgaaacccagaacagcgcacaagacggctgactcaactgatggctagtgagctaacaatgtctacagcaactacgtcttctgatcactaattggggctgcactcggatgctcctcggtgtgatcaagactagtttgctaatagattttgttttgccccactatctacctcagtctggtgcgttgaagcaaaaagaggaatttagtcacggaaagactgcccgctctctcgaacgctcggtaaatcccccgaagggatgcaaactgctgctcatagagaaacgtcacggtcgagacggatccagaagttgccacagcttcaaacgccgtatcaaaaacctcctctaatactcgcccagtcccgatcagaaactccatcacttctgtacgacgcgtcataccggtagccgctttgaggaacgcgtcctgaaccaagttctcgtcattatggccacgctcgtacaggtactggactgcgatgaggaacccgtcgcccgccatctcgacaaacaaattcttcccttcaaagtagaaggggaagacctggtagatcttctcagcgataacatgctgctgctttctcaccgcctccataaaggcggaggccacgttccacggataccgcagcaggtagaccaccacgtcgacatatcccccagctatggcaagtgacacggccttactgtcggtgcatcgctcatcgtcgctcggggtcctgatcacgtaccgtgacgcgaattgcaccaccgccaagtgcccatgtactgccgcctcctccaacactttccaggccgcctcttcacggactttcccgcggacttccaacgagcgcagcagcaactcgaccgtgtcgagatggccacttcttgcggcaatgatcgctgccttttcaagtgttgcgatggtgtcggagccgaagcaccgtcgacacgggtcatccaactcgtgcagcagctgcaggaccgtctggagggtgttcccttcggaggtggcggtcgctgctgcgtgctccaaggtgcccataaactcgtttagaagttgcttcagccaccccgattgccccgatgctgcggcttgcagaactgcatcctctggggtcatccacagcgcggcagcacgctggagcacgagcggcaacttctgaatctcgaccggaaggtcaacgcttggcaggggggaggcagcttcgtcaacgtccatgatcgtgcatacgcgcttggaggaggaactgtcgtccgagtcggagctctcgagcgccctctcgctgctgctgctgctggaagtgtcgctcgacatgctcttcggcttttgggtgagtagcgggatgcggtccactgtcgttgaagtactgtacgtctgaattcgaattattattttttcctactgattcatacaatttagcgcggtagtgagtcattacgtttcgagcttgcgacgttgtcgatgttgcgcaccactcgactgctgcagataaagttgtgaatgaagctaaccagtttgccgggtcgctccagttgtgtaagagcgctcgtgaatacggaccgtaattcgtcattatggctcgatgagatgggtacatggagccaagttttgacgaggagatgcgacacaaacgaaaacgaaggtagctacagcatgtaggaagtacttggagcatgcatgtacgacctctctattgaacgcgtgccagacgcgtttcggccccccgccgggggcctcgtcagtggctttaccaatcgagaagtgagctctctctcgactctggtgtctaaccgtgtatccccaccatggggttacacctacgtgcctgcagcacttccaacacagcatggcgaagcgagaacgcgaagactctgctgcccaagtcgcagccgccttcaagcacgcgcgcgtggccgcatatcaagccgacgaagatggggacgacgcagtgcaggcagcgtcggccgctcccccgagcaagctcaagggggttcgcttcccggtcgaaatcacggtactgccacatattttgcggcagcttgaagacttcctgctgacacctgacgaagccatgtatgaggcggcagcaagtggccaagtggcccgggtggaggagcttttgcacagatttgactgcaagctgctggacccgttcacacttgcagcgggcaatggccatgtggcagttgttcaagtgatgctacccgagttgctcaagccccggagtgagccagaccgtgacacgtgggaagccatactcgacggcttctttgctgctggggagaacgtgcaccttgttatcctgctcgtgctgcggccgttcctcactagagctaggaatcgcaagaggaaatacgaggcgtacgaaacagccacccatttgttggagaacgcagcaggccaaggccatctcggcatcgttcggttcatgataacacacgctacatcgatgtacgtgaacggcatgaatgcagaggacgagtcgttggccctcgagagagcgatctccggcaagcacatggacgtcgtggagtacctgctgaatttggacgtggccgggttccgtttggacttcagcggctcgttcagtgccgcgctcgacgctgggctgtacgagctggcggacagaatctatgatgtctatgctcgagctcgcccaaggcgtaagttgcttcatgagctggcacattacgattacgtggaggccgtcaagtaccttctcggcaagggaatcggtctacatttggttgacgcgttattcgagaaagccgcaatggggtgtgccgtcgctgtcgtggagttcttgtggagttctttcaaattgtcaccgggacttttcgaccaagtgtttgaaaaaactgctactactggatggaacagacgcgaagtggtaccgattctctataagaagaagcgcccggcttctcagattgttctcagagtgtttgggcttacgggtagtaccaccgtactcaaactcttgcttgagaacgagccgataccagatgaatctatcgtcgccgcctttgaacgtgcaacttcaagcaacctccgacgcaagactagaataatcgaactgctgtacaagagggagtgcatttcgtctgaacttctcacaagggcgcttgtgggggcagtagtgcaaggcagcactaaagatgtggaattattgcgcggcgactctcgtattctgccgcaagtggtggacaagaccttcattgacgtggctctgggagggcgcggcagtcggatgaagaagctgtatgaaagtcagctcgtttcgcctgaggcaattttcgaagcattcatcaccgctgttagtggcactaaacggcaaaacgtgacacatctcgcgagctacttgtcgaacggaacgcgtgttccgcagcatctaaaagattccggtttcgtgtgtgcggcaagacatgggcaaatgcaagcgatagcagcactgaaccgagatgaaaaggaagagtggtcactcggcgtgctccaggaggctttggaggccgcgcgaaataactcaatcaggaactacattcgcacagtcacatgcaatcaactattcaaccgacgagtccaaggccgccttgaagctgtggcgaagttcttggcagactggactgaagaatcgaaggccgagtaggacttgttggcaagccaactctttttgaatgtattgtgcttcgttcgttgtgtctccgattaaagacaattcaacaaggctctataggatagcggcagctgccatgatttatacaggctacccttttaccgggagggctcgcagcttgggcgcaaacgctttgaacttggaggtcctcctcggattcccaagaagcctaccgcaggttattcttgagggctgtggcctcgaaaaccgtcgggcttgctcttaaatcgtcatcaggttttgagttccgcttgggcattggcgacagcttacacagacccagaaccttgaaccccttcctcggtttctgttgtgggcaggctatccgtagtctccttgctgccatccggaaggatgcggtgtgtctttttgccatattttcgtattggcagctttcatgttcgaggtgaacaccacaaggacgacctaaaacacgatcaagggacgcctgcgggggccaagcgaaaaaaatgaatgtggcaacagttgtgcatctctagacaggattacctgacgttggtactgccgcaaaaatatcacacctacagtacctagcgcgtccattagagcttgggtagccaactcggcaggaaaacctacgcggcttgtaagctcttggtagatgcagtgctcactccgagtgtgactggcgttagatgtaaaaaaaattgtaagctattgagtagatgaacctggtcattggacctaagcgcacacgaaaacttcagaaaacagatcttatgaataaccagtccgttgctgcaaatggatcgtgtgacttcttctagttcctcgcttacatatcaccctcaataacggtgtttactgtacttagtgaccttggactccgccttgctccttctcgtgttcggtaagaacttcacagcatcggtgagccaaagtgagcgggacattcaaacgccttattcgacgactcgccagaaagtagcctgatcatcctcttggggtatgcacgatgaaagcatattcacaattggcttgttatccgcacggacgacatcgtcgagagctttcccgatattatagtgacgcactggcggtgatacctagcgttatcaatgaatcatggtccattcttgaagtgtagtcagcaaacggtgtcagcagatcttagtcctccttgcttgcaaactcgtgatgccgcgaattgatagggttcacgttcctattgcacacgacgaaggcgaccatgactcgattggctcttcgaatcctacgaccttaccgtacttcacaaattaaaagctttttcatggatcgcgatcctgtgggggaaatgaacttcatttagggcttctcgggagtggagcggataaaaagagcttcggctgtccatctggccttcctgctaagactaaacttagcctaaaaagttcaggtagacttctggtgatccggaaaggcaggcttcctcgttcgactgcaacgtcatcgacatcttgccaagagagccatgcgcgcgaccactccaacgcccaagagaccccggaacggaggaacaggactcgacccgcggccgtctcaagcgtcgaagcgggctcgcactgctgcagtagaggatggagagtacgagcgactcaagcatgcaatgtttccagctaaaataatggcactgccccacattatgaagcagatcgaccggctgttgatgacaccggaggaggcgctggtggacgcagcagctacagggcgaatacggtggctccactacctcctatacgagtccaactgcggcctccgcaaggcgctcgtggctgcggcttccagaggtcatcggaaagtcgtgacgatgctgctgatattcagttcagacagcgatcgcgaagggaatgaagatcgactgacaacgctattggaggctgcagtagcggctggtgcaggtggacacttccaggtcgtgcaggtactgctctttcatgtagatctccaaagcgatagacccagtgaaatgcgatcaggagctgcgaacattttaaaagaagcggcggcaaatgggcacttggctgtgctcaagtttgtggtcgagtacgcgaaggaacgaggctatacgaatgcaaaaacttttgggtcacgagcactacagctggccatttctggagaacacaaggaggtggtggagtatttgctcgaactggatggatttcggtgggatttggcgggtgcgtttgctgctgcagtggatatgaagcagagtgcactggtgcggagggtcgaggagatgtacccgaagctcttccctggccacaacctgttcgttcatttggctcgcgacggacatcttaatggcgttaagttcatctacaaaagagggtacaggttcatcaaggcgatcaataacgccttctttcgcgcggcgctccatgggaagacaagtgtggttgaatttctgcttggtacgggtcacattgactccgagacatttgacaagggctttgagggtgctgcggggtcgacaggaggaattcaactggagacgactctcttcctctacgacacgcgtcgtgcgtcgtcgcaattgctgaacaaagtgtttgagatcacggacagcgtcgaggtgatccagcgactgtatgagaacggccatacaaatatctcggaagaatcgattaccgctgctttcaagcgggctgctggttgcgtgaacagtgctaatgttttcgagtctgaccaccccaaaatcgtgatggtgttatgtgcggatacacgtattcctctagagattcttaacgaggccttcgtaattgcggcccgggaagaccgcagtgatgtcgtgaagtgtatgcgggacgatcctcggatttcttccgagtccgtgggcgaggcttttgctgccgctgcgggcagcggtaacctcgagatgatggagagtctatacgatgtggagcgggtttctcccgagacgatcctccaagcctttgaaaaggcccctattcatgataatttgcctatcattacgtatcttgtgaagcttttatcagatgaaaagcacgtggcacgaaagtttaagcacaaggcgttcgtcagtgctgccaagcgcagtaaatacgcgagtatcctggagcttctcagcagtaactttggagaatggccgctggacgtgctgaaagaagcttacgatgccgcagtgtattgcgcaccccggaactacatttccaagttgacttgcgaccagctttttggcacgaagaacgaagagcgactgaacgcaatggtcaagtggatggaaaagtggccacaaccagcaaccaaaaagtaaggccacgccgtactgtctcctcgccgattacgcggtggccttatctgttcgatcaacttggactctcgcaaataatttaaactccacgcacgtttggagtgtttggagtggagattcgttttcatttacatgtacatggctgatgacatcaagacttccgtctgaagtacttgtgaagtggggttttactggagaagttatctagcgggggaaccagaacactactgagcgccttaggcagtcagcttgaggtatccgttccggatgaggtagcgcatggaccatcccgtgcgcttgaccgtctcgtccgagttgcgccacgcccagaaggcccagccgccggtcgtgtcggcgttgtagtaggcgagctgcttgcggcccagctcgcggaagttgtcgatgttctggaagatgcccctcgcgtcgggcgggccgcccatgcaccactcgcccaggaagagcggttgttggtaggcgccgccttgaggtggctctgggcgtactggtcgatgaccgcgagcacctgctcctccgtcttgccctcgtagccccagatgaagtaggcgtggatctcggtccaggcgttcgtgtactcgggggcgccgatcatgcccttgaggtgctccgggtcctgctcgctcaggaacggggtcaccagccggatgcagtcgttgcccgtggctcggatctgcttgtacgcctggatgtagtagttccgcagcacgttgccgtccacgaacggcacgggctcgttcatgcggttcaagcccaggaacgccgggctgttcttgtaccgcgccgcgaggaacgtcgcgaacttgagcgagttgtccacgttggtctgcgacgtgctccagcccacgttgcccagcgtcacgggggcgctgtgctcgatgccgttctggctgccctggtgcgcgtggaggctgatcatgacggcgacgttgtacttgacggcccagttgttgatgagcgcgtccaggtacttgaggccgccgcgcgcgtacatgtcgccctcggttccgggcgcagtggtggcgtcgcggatgatccagtggcccacggggacgcgcacggtgttgagcacgccagtctcggcgatctccttgatgtcggcctcggtgatccacgtcttgcggtgctgctcgaacgccgccgtgcccttctccttgccctggagctgcatcgtgtggtactcgcccttgtggtcttcgtccgccgagatgccgttccacagcgcagactcccacgtgatccagtgctccgtcaagagccagccgcccaggttgacggccttggactgcacggctccgctgcggatctggacctggatgtggccgccgtctgtcgtgttcgtagcgcgaggcctcgaggaggaggaggaagacacgacggcggacacggcccccacggccttcttcctcgtgcccgtgccgcgcttgaggtagcagtgcggctggccatcccagccattgttcacgaacgtgtacgcggcacagcccgaagtactggcgcaccggttgcagcagtcgtcggggagctacatgcccgtgaggtcggcgaggtcagcgccattgtagtcgatgccgacctcgggcgtgccgcacctggcgggcgttggccggctggtagtaggtcgggttccacggctggcagtagtttccggagacgcagcagttggggccactctggtcgttgccgcagtaggcacaagcttcggacgcttcgacgaggagaacgtgtggacacatccgccgatgactcggaggatccgacggcgacgggagagccggcggcagccgggctgtggatataccaatggctagtcagggagacccaagtatactcagatcaagtcaatcggaacccgggagtaatccgtctgatgagaggcaccaacgagcacaaggagaacaagaaggaaagcaggaggggaagactagagagtagtttgagagacgacaacatttaatctcacttcggaatttgccccctaaaccacaagccacaaaccaacaggttaacagccgcaacaagctcaagccctccccgacgaccgacatgacgacgtccagcaagaaggccgaagtcatcctgggaagcgacaattacttccactgggagttcgcgatgcgtatgacgctcgcgaggaaggggctgctggcgcacgtccaagtggtgaaggacccgacggagatgacggaggcctggatgctcaacgacatgaaggcgctcggtctgatcgctcaaggcgtggctgtggaacaccacacgaagattcggtcggcgacgtcggctatccaagcctggaatactctacgcgagttctacaaccggacgacgatgcataatcgggtcacgatgactcatcggctccatgagttcaagatggaggacggtgcgacgatggcgaagcacctggacaagttcgacgagctcatcgtgggcctccagacgcttggagagccgctcgatgacttccgacaactcgtcatcctgttgagcagcttgccggcggagtacgagttgatcgcatccatcgttgagaactcgaaggatgtgatcctcatcgaggtgaaggagaagctgctcaaggagtacgagcggcaggagaagaaggagacctcggagcgcgcgttgaaggctacctcgttcggaggtaggggccagaacgggaagttcggcaagggcggcaaggcattcggccgcaagcgcaacggcggacgaaaggtcggtggcttcaagggcaagtgcttcaactgtgaccaagtgggccacatgaagcgggactgcccggaaaagggaaatggagacaccgccgaggactgggtgttcgctgtggcggagaatccttcagcgggttggctgatcgatagtagggcgacggctcacatgacgcctcaccgcgatgacttgttcgagtacaacgagtcgtcggcggacatttatgtgacaatcgcggacgggaagaagatccgcgtggctgggaaagggtcggtgcgcctaacgggcatcggcggcaagcgcatcaagatggtggaggtgctccacatccccggactcgaccggcgactactctcggttgggaggttggctgaacgcggcatgagtgtcgagttccagcggaagtcgtgcgtcatctgggacaagacgaaggcgatcgcttcggggaagaaggtcggcaaggcgtacttgctggactgccagcaggacatggcgcactacaccgagtactcgggagtcgacggaaagtgggagctatggcacgctcgtatgggacacttgaacggagacgctatggcgaagacccgcgaggcgacggacgggatcccgacgactcaacagcagacgaagaccctgtgcggaggatgcatgaagggcaagcagacggtcgcacatttcccgtcgcggtcgacgtcggcgacgactcgaccgctggaactggttcatacagacgtgatgggtcctatgaagacgaagtccaagggcggagcgaggtatgtgctcacctttgtcgacgactactcgcgacacgtcgtggcgtacttcttgaccaagaagagcgaggtcgtgaccaagttcaagtcgttcatgaagctgtacgagaaccagtgggggcagcgcattaaatgcctgcgctcggacaacggcactgagttcgtgaacacgccgatgactgattcctgccgggtgaatgggattatgcatcagaagacggtcccgtatagcccccagcagaatggcgtggcggagcggatgaaccgcacgatcatggagaaggctcgaagcatgctacactacaagggcgtggcttcgatatggtgggcagaggcggtcagcactgctgcctacctgatcaaccggtcgacgaacagcatgtacccgaccaagactccgtacgagttgacgttcaagtcgaagcctcggctggaccatcttcgagtcttcgggtcgattggttacgcccatgtcaacaagtcgcgacgcaccaagttggagccgaagagcttcaaatgtatgtttcttgggtacgccgacgactcaaaaagctaccgagtgtacgacttggagtcaaacaaggtgaaggtgtccaggtcggtgaagctggacgagcgcgaggtgaacgacatctacgacacgtcgcccagcgataactcgccgatcattcagtcgacggaagatgtcgacgatgaagtggcgctgcacgaggagatgcaacgacctgccgccgacgagccgatggaatcggcggaagagaccgtcgaggacgcggaaatacatgaggcggagacgccggagccatccatgcaggagctgacaacgtaccgacgactcgcgagaccggtgtttaatgatgacatggtcttccatccggagtcggaacggaccaggcgtgccgaagaaccggtactactacttggagatagttccgcagacggtgaggagtcgaaagaagatggtcccgatgactcggacaacgatgaccacttctggccaccgtctccgaagcgacccagggtggacgaagacagcctattggctgaggcggtgctggcctacgccgcagacgtcggcgatgccaatgacgcacccaccacgtatcagcaggccatgcagagcgacgagtcgtcggagtgggtgaaggcaatgaatgcggagctcaaggcacatgcggacaacggatcatggacgttggtccgtcggacaccgagtactcgaccaatcggttgtcgctgggtgttcgcaaagaatcgcgacgagcacggccgagtcatcaggtataaggcccgcctggtggcgaaagggtttaagcagaagtttggcgtggacttattcgagacgtactcgcccgtggccaacatgaactcgatccgagtggtgttgtcggttgtggtggccgaggcgtacatcaccgagcagctggatgcggacaccgcctttctcaacagcgggctggtggagcgcgtctacatggaggtgccctacggaatcatcaacgcgaagaacatgatgtgtcggctgcagaaggcgatctatggtctgaagcaggcggcgaatgcctggcataagaccatccaccgagtcttcgtgggcatcggattttgagctgcggtggcgaccagtgcgtatacgtcaagggcgagaagggcaggttcgtatatgtctacctgtacgtggacgacttgatcatcgcggccaagacgagcaacgagatctaggaagtcaagatggcgctcaagaatgcgtttaagatgaaggagttgggcgaagccaagtttatacttggtatggaactcatcggcgaagactctcatgatcaagcagactcgatttattgatgatgtggtgaagcggttcaaccagcaggacgccaaggtggtggtgaacccttgcgagtcgggcatgaagttgtcgaagactcagtcgccgacgactcagaaggaacgcgaggaaatgcaggcgaagccctaccgaacactcattggctgtttgttgtacattacaacttgcaccagacctaatgtggcgtacatcgtgacccagttgtcgcgcttccttgagagccccgggcagcagcactggaaggctgccatccgcgtgctcaggtacctgaagagcacccaagacatcggcatcgcctacaatgggaacgcgaagaaggtcgaggtgacggcgtacaccgacgccgactggggcagcaatctcgacgaccgacgctcggtgtcgggcatcatggtgatgattagcggggcgccggtggtcttcaagtcgaagtaccaacgcacggtggcgctcagctcggcggaggccgagttcatggcgctgagcctgtgcacgcaggaggtgctgtggacccgcgccatgctcaaggacatgggtcacgagcaagtgggagctacccaagtatgggaggacaaccagggcgcgatcgccctcgcaagcaacgctgggtacaacgcgaggaccaagcacgtggacgtcaagcatcatttcatccgcgaaaatgtgtcccgaggactcatcgtcgtcaactacgtgccgacggaggaccagctcgcggacatgcttaccaaggcgttgggaacgaagaggctcaagtacctgatcagcgcaagcggaatcgtcgggacggtcgtgcagcattagcggcgagtgggagtgtccatgagtcttcgggagcgccgccaatatatgcacatggacgaggcgaacgtgtggacacatccgccgatgactcggaggatccgacggcgacgggagagccggcggcagccgggctctggatataccaatgactggtcagggagacccaagtatactcagatcaagtcaatcggaacccgggaataatccgtctgatgagaggcatcaacgagcacaaggagaacaagaaggaaagcaggaggggaagactagagagtagtttgagagacgataacatttaatctcacttcggaatttgccccctaaaccacaagctacaaaccaacacagcgctatcaacaaagaggaaggactccaaggcatcgctggcttgtggtgcagctgctgagctcttggacggaaaactgcaagtgaaggacttgttggctgtagctctactgcaggagggattctgttccgggaagaagaccacgtataaacgaccaggcaacagctgatgctgtgctcctcaacatgtcccgcgggtgagtcaatgcgctacagtaggcaacaaccgatgatgtgcacccagacgctactatcacgtggcaaattttaacacacgtaatgtgaccagagctgagatcacggtgggcacctgttatcgagtccaaacacatcattttcaccattgtcatcgttcctctagtgaaggccgacgaaaccaatgcaccaccttcctcggtacagcaccagcaaaaaagcaacactccggttctccaacacaacaatgcgttcccccatcataaatatgccaaccagacagcgcaaacacactccagatgatcctgacaagccagtctccaaagtgcaacgtgatctgttgtgctgtttaacacgcgttatccgggtttgttatcaaacgatgcaactcactacagtatctgtggtagcatgaagataacctggaacgatgcctcgtccaacagttcatgttgcagatgatgcacaatactttacactgtatcatgatgcgttgtagtgaccttggggtcacgaaggatgtcgctgttttaccgaccggtagctgcgggattggaaacctctgtcgattcatcaaagcccccccccccactttcgcactacagtctcgtcaatcgagcgtgcgatctacactgttgaaaaataaagcgacgtaaggtatcgactgattatcaccagtcttactggttctcgggaccctgcatcaacatgaaccaaagctggctttttcgatttttttagtgatacggacgctattattgtctcttcctaagataatatccgacaaagcttgggcatttcactatacggacgacaacacctctgacgaagctcccaagggagaatggacccagcagcttcagcaccggaaggagcaagcgaccctcgtccactcaagcgcccgaagcacgccaagctccctgacaagatcctggctctaccgcatgtactcaagctacttcagacgttcctgatgacgcccgaacgggccaccatagaggcagcgcgcactggcaacatgccatggctagcccaactactggaaaactacgattgcgaggtgccgcaagccatggtatatgctgctgcgaacggtcagctcagagcggcggtcatgcagttcttcgcattcttccactgcgccctgacggacgaaaccaggagaattctgctaaaatcactgtgagtggccggtcggaacaaccgcgttcgggttgtcgagtttctactgccggaagctatcaagtctggtgacatgagtcacagagaactgcaggcgtgtggtgcagctcatgccgttctgaacgacgcagcaggaaacggacaactggaagtggtcaaatgtgtcgtgaaacatgcaaacgagaacggatacgagtggcggttcctggtcactagttcgggatctgaggcgctagcacgtgctatcaccggaaaacacgctggcgtcgtggattatttgctacaagcgagtggattccgctggaacctggttgacgcttttgaggccgcagtggttacggataatgaagtgctggtggagaagatttacgagttattctcgcagcgggaaggcgatttcaagctgtttatcgagttggcatggtggggaaagcttcgcggtgtgcagtatctgtatcgaaatggttacgcctccccggagttggtaaacgaggcttttctgaaaactgcaggtttccactggtctcctgtcgtcatctacctgcacgatacgggcctgattacgtcggacgtgtttgacaaggcattcatcatggcagtcagcgcaacgtggaccaccacgaagacggtggaatacttctgtcacctgaagcgcgcctccgcggaagcgaggagcaaggcatttgtgactgcgcattgccctgagagagtcaagatacttctcgagaacgaacgcatctcagatgcatctatcatcgacgcgttcacgttatctggatacgcacaccgatacttgtccaaacactacttgtcgcgcagcatcgacttcgtcaagttgctgggcaagaatgcctgcattccggccgaagttattggtgaggtgtttgtgaccgcagcctcgaagaactgccccgagctagtggggctattgcggaacgaccctcgcatgtctggcgagatggttgagaaggccttcgttggggctgctggagaggaagattgcaagctggtgcaatccctgtacgacaagaaaatcctttcaccagagacgatcttggctgcttttgaaagtgccgctgcaatgggatcggacgacgtagtgaaggagattgtcatgtacctgtccgatgctgcgcatgtgcccagactgatcaggctcaagtctttcgtggaagcgctgggcgcgacggaggatttagtgaagaagagcttcatccgcgaagtgatttgtgaccaactctttgatgcgagagctcctgagcgctttgagaccctcgcgaagtgcatggacaagtgggcggtccacggaaccggttcgaaggcccggttaagtgaaccggatgtttccgacttggagaaaccacggcagaagtggtttcgaagccaagaacagcgagagcgcggcgctcgtacgagagaagaaggcccgcggcccaatatttttgtttcttctctacgtggacttgcatctgactggagattagtatttttctccctacgggttatatagactgttctccggggtcaagtctacgcgaaatactagaagggtagatggattagtttggtattggcagccaagtctcactaactaatcaagtgcttgcccccctctcatcgctgtgagtgacgacaccaaaggaaactgaatcgatgtccacaggaggacggatgctcgttgccgtgtgaaatgaggaagtcgtggcgaaggtggtcgaggtatatgctgtatgcgtaggggtttaggcaattcctgtagggtaacgatgcgttttcaagttcatctcaccttatccaacccggggttggcaaacccctcaagctatttctcggtgtcgctgcaaatcttccaggatgattttcaatttcattggaagcgggatccaaaatgcggctgatcgacgctgcgttcgcttgagacttgcgtggggctcgcaaggcgatagtcggtggctgcgacctggacgagcggggtgcgaacgggagcactgccgtcatggaagctgctcggatgggccacgtcgacgtcctcacgttcctcttgacgagtggcgcgtctatcaatttggtcaacttcgacggccgcacgtcgcttcactgggcagtggatcgtgagcaattccaagctgttaaggttcttttggctttcgacgctaacgtcgatctgggcgataacatgggggtcacacctctcatgctggcagcaaagcggggttttgttgcgctggcggagctgttgattgacgcggcaccaaattgtgtgcgtgctatcgacaagacaggggacagcgcactgaccatcgccgcacacaacggacaactggagatcgttcgtcttcttctgagtgagagagttccgacttttagtttgagcaacgggggagctccgacgcccctcacgttggccgcggcacaaggtcacgtggaaattatgcggcttttgatgaacaaaggagctgatgtaaacgggatgacgtggaacgagcacactgcgctgacatttgcagctgaaggttgcagagtgaaggctgtgcagatgctgctggagcgaggggctgaagttaacaagcacggcgtgaattcaccgccgctggcaacagcagctcagaacggccacgtcgaggtcatcaagttgctgcgtcagcataatgcggatgtaaacgctcaagacgctgacggtgactcagcactgcatgaaacagtgtacagtcggtcaacggagtgcgcgcgagtattagtgcgtggcttaagtgtggatgtggtcgtggatatacgaaacaaaagtgggtggactcctcttatggcgacggtgcagcgtgagctggttgaggttgtggatattctcctaggcaaaggtgcctctgtagagttgaagaccgaggatggccgtaccgctcttcatattgctgcggaagaaggtcgtgccgatgtgattggcttgctgcttcgtcgaggagcgaatgtcgatgctgcaaacctgtcaaagtggactccactgatgctggcagcgtatcgcgggcataaagagacggtaaagctgcttgtgaaggaaggggcaagtctgacggtgaagaataaggatggcgcaaaggctgcagagatcgcgaagttgaacaacaggacggatctcctcgatcttctccagtctggaattgacctcgaacggtaaacgccagcgcacatgttgaccacagacaactaggaatcacgtttgcgaagtgtattccttgttggctagttggctctgcaacgttatcaccagacgtgggttgcttaagcatatttggcgagattactacaatcaacacgccagcgagtggctggctacaaaggtttgtaggccgacgtagcgtgattatcttgatgaaaagaggaggcagctgtcagcgtgtgcactacgtttgcgtgacgaatgccatcagtctattcaatagcaacgttggcgtgctattggcccaatagactctattggtcacgccaacgttgctgcatacagattgtttatcctgcagataaccgcaactacaagtctcgtctatcgtatttcagccaggcaaaactgggttgctgatgaattaaagcgccagcgtacttctctcactttccgatttacaccaaacgtgatcagcacccagcagcgatgacttggagtccttcctctttgttgatagcactggctgccgtcactctccatggcgtgaccgcctccaccgaagcgtccgaagcttgtgcctactgcggcaacgaccagagcggccccaactgctgcgtctccggaaactactgccagccgtggaacccgacctactaccagccggccaacgcccgccaggtgcggcacgcccgaggtcggcatcgactacaatggcgctgacctcgccgacctcacgggcatgtagctccccgacgactgctgcaaccggtgcgccagtacttcgggctgtgccgcgtacacgttcgtgaacaatggctgggatggccagccgcactgctacctcaagcgcggcacgggcacgaggaagaaggccgtgggggccgtgtccgccgtcgtgtcttcctcctcctcctcgaggcctcgcgctacgaacacgacagacggcggccacatccaggtccagatccgcagcggagccgtgcagtccaaggccgtcaacctgggcggctggctcttgacggagcactggatcacgtgggagtctgcgctgtggaacggcatctcggcggacgaagaccacaagggcgagtaccacacgatgcagctccagggcaaggagaagggcacggcggcgttcgagcagcaccgcaagacgtggatcaccgaggccgacatcaaggagatcgccgagactggcgtgctcaacaccgtgcgcgtccccgtgggccactggatcatccgcgacgccaccactgcgcccggaaccgagggcgacatgtacgcgcgcggcggcctcaagtacctggacgcgctcatcaacaactgggccgtcaagtacaacgtcgccgtcatgatcagcctccacgcgcaccagggcagccagaacggcatcgagcacagcgcccccgtgacgctgggcaacgtgggctggagcacgtcgcagaccaacgtggacaactcgctcaagttcgcgacgttcctcgcggcgcggtacaagaacagcccggcgttcctgggcttgaacctcatgaacgagcccgtgccgcccgtggacggcaacgtgctgcggaactactacatccaggcgtacaagcagatccgagccacgggcaacgactgcatccggctggtgaccccgttcctgagcgagcaggacccggagcacctcaagggcatgatcggcgcccccgagtacacgaacgcctggaccgagatccacgcctacttcatctggggctacgagggcaagacggaggagcaggtgctcgcggtcatcgaccagtacgcccagagccacctcaaggcggcgcctaccaagaaccgctcttcctgggcgagtggtgcatgggcgacccgcccgactcgaggggcatcttccagaacatcgacaacttccgcgagctgggccgcaagcagctcgcctactacaacgccgacacgaccggcggctgggccttctggacgtggcgcaactcggacgagacggtcaagcgcacgggatggtccatgcgctacctcatccggaacggatacctcaagctgactgcctaaggcgctcagtagtgttctggttcccccgctagataacttctccagtaaaaccccacttcacaagcaaggcacccgaaaaaataatactcataaaaatacattcgaatactttaattcaatgataaattttagaccctcaatttatttttgaattgcacacaattcgtatttgaattgctcagatggagtttgttgcagccaccagtgtccgccgaagagtccaccaccaaccactcgccgatctggcaccacttcaccgcaccactcgcagcggaggctccttcagaatccaatttgctttcttcacccctcaccgcccaagcccctcgccccacgtgtccaccatggtcctcacgagcagccaaatctgctccatgcttttcactgatgtcggcaacggcttctacaagtgtacatcctgcgacaagcagtacaagaacggcaatggctacacgaacctgctgagccacctgcagcgcaaccacgacaactacgagcaagagccccaggaggcgtcacgccgccagaacccgctgcgcctacacctcgtcagcacacggaccagggacctataccgctggcttgagtgggtcgtctgcgaccgcctcccgtttgcgttcgtagagcggcggctcacgcgcctcaacgcctccctctctctcgtgtcggagaacaccctctccaagtacatcgtgctgattttcgagctgctagagctgcgcgtcgctcgcgagctccctgcatcgttcggcctcgttcgagacgggtggaccagtggtggtcgtcactacatcgcgatattcgcggtattcggtagcgacagtaccggtattgccggtggcggcgctgacaacgagtactatgacgatctcgagtgctcatcgcgccgcttcctgctgttaacattcgctccagtagaagtcgaggaagacatgggtgcgcagagtcagtacgacctgatcgctgacacgctgtctcgctataacaagccctggagcgcggtgaagttcatggtgggagacaactgctctgtgaaccaatgcatcggccggaaggaaggggctatccccttcattggatgtgctagccacagattcaatttggcgatgaaggacttcttcaagaccgaggacgagctcattgcgaaggtgcacgcgctgatgaccaagctccggacgatcatgggccgcggtctgcttcgccgcgtctctcatctgtcgcctctgttgaggaaggacaccaggtggtcgagcacgtacgagatggtgggacgctatgtgaagctccagcccgccataatcaagctggtccatgaccttctggtcaagtatgaagtacagccgcttttgctgcggcgcgccgagcacgagcgagccaaggcgttggagaaggacctggagaagttcgagggagtcacgaaagagctacagaggtctacgctaactttgtctgctgtgcgccgtctttttgaccagggggtgaaggagtaccctgcactcaagtcacgactggccgcaacggctccgatcgtcaacaacccgcatttagaaatggacctcgtcaagcttcagcgcgaagaggctttggcggccgcggaacggtcggcgtgtgccgagtttagatcgacgacccttgaaagggcaccagcgcgggaggacggcaacagctctatcgtcaaggcggcgttcaagaagaggaaggcaccgaggcgctcgcaatacgtggccgtcacctacgtgccgccgacgtccaacgaatgcgagcgctttttttcggcggcgaagctggtgctcacagacgtgcggaagagtctctcccccaccatgctcgagatgctgatgtgtctgcagtacaaccgcgacttgtgggacgtcaacacggtggagcaggttcgtgcacgaattggcagcaattaatggcaataatgcaatgattaatttttgcccgcagtttagaagtattaatctaagtatttcattctcgggtgccctgttcacaagtgcttcagatggaagtcttgatgtcatcagccatgtacatgtaaatgaaaacgaatctccactccaaacactccaaacgtgcgtggagtttaaattatttgcgttgatcgaacagataaggccaccgcgtaatcggcgaggagacagtacggcgtggccttactttttggttgctggttgtggccacttttccatccacttgaccattgcgttcagtcgctcttcgttcttcgtgccaaaaagctggtcgcaagtcaacttggaaatgtagttccggggtgcgcaatacactgcggcatcgtaagcttctttcagcacgtccagcggccattctccaaagttactgctgagaagctccaggatactcgcgtatttactgcgcttggcagcactgacgaacgccttgtgcttaaactttcgtgccacgtgcttttcatctgataaaagcttcacaagatacgtaatgataggcaaattatcatgaataggggccttttcaaaggcttggaggatcgtctcgggagaaacccgctccacatcgtatagactctccatcatctcgaggttaccgctgcccgcagcggcagcaaaagcctcgcccacggactcggaagaaatccgaggatcgtcccgcatacacttcacgacatcactgcggtcttcccgggccgcaattacgaaggcctcgttaagaatctctagaggaatacgtgtatccgcacataacaccatcacgattttggggtggtcagactcgaaaacattagcactgttcacgcaaccagcagcccgcttgaaagcagcggtaatcgattcttccgagatatttgtatggccgttctcatacagtcgctggatcacctcgacgctgtccgtgatctcaaacactttgttcagcaattgcgacgacgcacgacgcgtgtcgtagaggaagagagtcgtctccagttgaattcctcctgtcgaccccgcagcaccctcaaagcccttgtcaaatgtctcggagtcaatgtgacccgtaccaagcagaaattcaaccacacttgtcttcccatggagcgccgcgcgaaagaaggcgttattgatcgccttgatgaacctgtaccctcttttgtagatgaacttaacgccattaagatgtccgtcgcgagccaaatgaacgaacaggttgtggccagggaagagcttcgggtacatctcctcgaccctccgcaccagtgcactctgcttcatatccactgcagcagcaaacgcacccgccaaatcccaccgaaatccatccagttcgagcaaatactccaccacctccttgttctccagaaatggccagctgtagtgctcgtgacccaaaagtttttgcattcgtatagcctcgttccttcgcgtactcgaccacaaacttgagcacagccaagtgcccatttgccgccgcttcttttaaaatgttcgcagctcctgatcgcatttcactgggtctatcgctttggagatctacatgaaagagcagtacctgcacgacctggaagtgtccacctgcaccagccgctactgcagcctccaatagcgttgtcagtcgatcttcattcccttcgcgatcgctgtctgaactgaatatcagcagcatcgtcacgactttccgatgacctctggaagccgcagccacgagcgccttgcggaggccgcagttggactcgtataggaggtagtggagccaccgtattcgccctgtagctgctgcgtccaccagcgcctcctccggtgtcatcaacagccggtcgatctgcttcataatgtggggcagtgccattattttagctggaaacattgcatgcttgagtcgctcgtactctccatcctctactgcagcagtgcgagcccgcttcgacgcttgagacggccgcgggtcgagtcctgttcctccgttccggggtctcttgggcgttggagtggtcgcgcgcatggctctcttggcaagatgtcgatgacgttgcagtcgaacgaggaagcctgcctttccggatcaccagaagtctacctgaactttttaggctaagtttagtcttagcaggaaggccagatggacagccgagctctttttatccgctccactcccgagaagccctaaatgaagttcatttcccccacaggatcgcgatccatgaaaaagcttttaatttgtgaagtacggtaaggtcgtaggattcgaagagccaatcgagtcatggtcgccttcgtcgtgtgcaataggaacgtgaaccctatcaattcgcggcatcacgagtttgcaagcaaggaggactaagatctgctgacaccgtttgctgactacacttcaagaatggaccatgattcattgataacgctaggtatcaccgccagtgcgtcactataatatcgggaaagctctcgacgatgtcgtccgtgcggataacaagccaattgtgaatatgctttcatcgtgcataccccaagaggatgatcaggctactttctggcgagtcgtcgaataaggcgtttgaatgtcccgctcactttggctcaccgatgctgtgaagttcttaccgaacacgagaaggagcaaggcggagtccaaggtcactaagtacagtaaacaccgttattgagggtgatatgtaagcgaggaactagaagaagtcacacgatccatttgcagcaacggactggttattcataagatctgttttctgaagttttcgtgtgcgcttaggtccaatgaccaggttcatctactcaatagcttacaattttttttacatctaacgccagtcacactcggagtgagcactgcatctaccaagagcttacaagccgcgtaggttttcctgccgagttggctacccaagctctaatggacgcgctaggtactgtaggtgtgatatttttgcggcagtaccaacgtcaggtaatcctgtctagagatgcacaactgttgccacattcatttttttcgcttggcccccgcaggcgtcccttgatcgtgttttaggtcgtccttgtggtgttcacctcgaacatgaaagctgccaatacgaaaatatggcaaaaagacacaccgcatccttccggatggcagcaaggagactacggatagcctgcccacaacagaaaccgaggaaggggttcaaggttctgggtctgtgtaagctgtcgccaatgcccaagcggaactcaaaacctgatgacgatttaagagcaagcccgacggttttcgaggccacagccctcaagaataacctgcggtaggcttcttgggaatccgaggaggacctccaagttcaaagcgtttgcgcccaagctgcgagccctcccggtaaaagggtagcctgtataaatcatggcagctgccgctatcctatagagccttgttgaattgtctttaatcggagacacaacgaacgaagcacaatacattcaaaaagagttggcttgccaacaagtcctactcggccttcgattcttcagtccagtctgccaagaacttcgccacagcttcaaggcggcctcggactcgtcggttgaatagttgattgcatgtgactgtgcgaatgtagttcctgattgagttatttcgcgcggcctccaaagcctcctggagcacgccgagtgaccactcttccttttcatctcggttcagtgctgctatcgcttgcatttgcccatgtcttgccgcacacacgaaaccggaatcttttagatgctgcggaacacgcgttccgttcgacaagtagctcgcgagatgtgtcacgttttgccgtttagtgccactaacagcggtgatgaatgcttcgaaaattgcctcaggcgaaacgagctgactttcatacagcttcttcatccgactgccgcgccctcccagagccacgtcaatgaaggtcttgtccaccacttgcggcagaatacgagagtcgccgcgcaataattccacatctttagtgctgccttgcactactgccaccacaagcgcccttgtgagaagttcagacgaaatgcactccctcttgtacagcagttcgattattctagtcttgcgtcggaggttgcttgaagttgcacgttcaaaggcggcgacgatagattcatctggtatcggctcgttctcaagcaagagtttgagtacggtggtactacccgtaagcccaatcactctgagaacaatctgagaagccgggcgcttcttcttatagagaatcggtaccacttcgcgtctgttccatccagtagtagcagttttttcaaacacttggtcgaaaagtcccggtgacaatttgaaagaactccacaagaactccacgacagcgacggcacaccccattgcggctttctcgaataacgcgtcaaccaaatgtagaccgattcccttgccgagaaggtacttgacggcctccacgtaatcgtaatgtgccagctcatgaagcaacttacgccttgggcgagctcgagcatagacatcatagattctgtccgccagctcgtacagcccagcgtcgagcgcggcactgaacgagccgctgaagtccaaacggaacccggccacgtccaaattcagcaggtactccacgacgtccatgtgcttgccggagatcgctctctcgagggccaacgactcgtcctctgcattcatgccgttcacgtacatcgatgtagcgtgtgttatcatgaaccgaacgatgccgagatggccttggcctgctgcgttctccaacaaatgggtggctgtttcgtacgcctcgtatttcctcttgcgattcctagctctagtgaggaacggccgcagcacgagcaggataacaaggtgcacgttctccccagcagcaaagaagccgtcgagtatggcttcccacgtgtcacggtctggctcactccggggcttgagcaactcgggtagcatcacttgaacaactgccacatggccattgcccgctgcaagtgtgaacgggtccagcagcttgcagtcaaatctgtgcaaaagctcctccacccgggccacttggccacttgctgccgcctcatacatggcttcgtcaggtgtcagcaggaagtcttcaagctgccgcaaaatatgtggcagtaccgtgatttcgaccgggaagcgaacccccttgagcttgctcgggggagcggccgacgctgcctgcactgcgtcgtccccatcttcgtcggcttgatatgcggccacgcgcgcgtgcttgaaggcggctgcgacttgggcagcagagtcttcgcgttctcgcttcgccatgctgtgttggaagtgctgcaggcacgtaggtgtaaccccatggtggggatacacggttagacaccagagtcgagagagagctcacttctcgattggtaaagccactgacgaggcccccggcggggggccgaaacgcgtctggcacgcgttcaatagagaggtcgtacatgcatgctccaagtacttcctacatgctgtagctaccttcgttttcgtttgtgtcgcatctcctcgtcaaaacttggctccatgtacccatctcatcgagccataatgacgaattacggtccgtattcacgagcgctcttacacaactggagcgacccggcaaactggttagcttcattcacaactttatctgcagcagtcgagtggtgcgcaacatcgacaacgtcgcaagctcgaaacgtaatgactcactaccgcgctaaattgtatgaatcagtaggaaaaaataataattcgaattcagacgtacagtacttcaacgacagtggaccgcatcccgctactcacccaaaagccgaagagcatgtcgagcgacacttccagcagcagcagcagcgagagggcgctcgagagctccgactcggacgacagttcctcctccaagcgcgtatgcacgatcatggacgttgacgaagctgcctcccccctgccaagcgttgaccttccggtcgagattcagaagttgccgctcgtgctccagcgtgctgccgcgctgtggatgaccccagaggatgcagttctgcaagccgcagcatcggggcaatcggggtggctgaagcaacttctaaacgagtttatgggcaccttggagcacgcagcagcgaccgccacctccgaagggaacaccctccagacggtcctgcagctgctgcacgagttggatgacccgtgtcgacggtgcttcggctccgacaccatcgcaacacttgaaaaggcagcgatcattgccgcaagaagtggccatctcgacacggtcgagttgctgctgcgctcgttggaagtccgcgggaaagtccgtgaagaggcggcctggaaagtgttggaggaggcggcagtacatgggcacttggcggtggtgcaattcgcgtcacggtacgtgatcaggaccccgagcgacgatgagcgatgcaccgacagtaaggccgtgtcacttgccatagctgggggatatgtcgacgtggtggtctacctgctgcggtatccgtggaacgtggcctccgcctttatggaggcggtgagaaagcagcagcatgttatcgctgagaagatctaccaggtcttccccttctactttgaaggaaagaatttgtttgtcgagatggcgggcgacgggttcctcatcgcagtccagtacctgtacgagcgtggccataatgacgagaacttggttcaggacgcgttcctcaaagcggctaccggtatgacgcgtcgtacagaagtgatggagtttctgatcgggactgggcgagtatcagtggaggtttttgatacggcgtttgaagctgtggcaacttctggatccgtctcgaccgtgacgtttctctatgagcagcagttcgcatcccttcgggggatttaccgagcgttcgagagagcgggcagtctttccgtgaccaaattcctcttcaagacggagaaaatgcccgcgaagagcatcacgacagcatttgagaacgtgactgggatcgggtcgatagtcttgtcaattccgaagaaggagcgcgaagctgtggctgccttcttgtaccacaaccggagcgcgatgcccccggacgtgatctgcaccgtcttcgcgatgactgcgtacgatctagacgacctggtgacgattctctacgacgacccgagcatttcacgtgaagttgtgagtgctgccttgcaaaatgcgtcaggcttggggcatctgcgtatcgtccacttcctcatagacaaacctgagatcacgcagtccgtgaagcaagtggccctgctgttcgcagctcggagtaactaccgagctgttgttcagctgctggagaagggcgaagactggccacttgccactttgaatgaagcactgaaattgacgagcagcccgcggctgaaacaatttttgagggagagaattggtgacctagagctgagcctgctatgaaaacgaggcgagtccacctaagaccctcaactcgggtggtcattaaagcgtggctaactgtgaacatcttcagacccaacccaaccaagttagcagcggcggcatcggtaaccagtcaacagagacgtcccacccaaacttggtcttactttttagttgcactgcgtggcctttagtctctcttcgttcttggagttgaatagctggtcgcaagtcagcttggagatgtaattccgggccgcgcagtacagcgcagcgtcgtgggcttctttcagaacgtccagtggccactctccaaagttagtgccgagcacctccagcatgtacgtgtatttgctgcgcctggcaggactgacgaatgccttgtacttgatcgctctgatggcgcgatccccgtgagctggagccttctcaaaagcttggaagatcgcatcgggggaaacgcgcttagtgtcataaagactctccatcaacgcactgtttccacaccccgcagcggccgcgaaggcttcacctatcgactttgaagaaatccgacgatccttgcgcatacactccacaacatcatcgtgtccattctgagctgcactcaggaatgcctcgttaatcgtctccaggggaatgcagccgtcctcaaacaacaggatggcgatttcaggctgacccaacttgtgagcgtggatactgccgccgccgccgacagctctcttgaaagcagtgacgatcgcatcactggatatattttcgttctcatacagtcgctggatcacctcgacgctgtccgtgacctcaaacactttgttcagcgattgtgacgacgcacggtgcgtgtagtagaggaagagagtcgtctccagttgagttcctcctgtcgtccccgcagcaccttcgaagcccttgtcgaatgtttcaggcccaatgtggccagtaccaagcagaaattcaaccacacttgtcttcccgtggagcgccgcgcggaagaaggcgttgttgattgccttaataaacttatggagtcaagttcatctacgaaaaagggtactcacatgtccgtcgcgtgccaaatgaacgaacaggttgtggccagggaaaagctttgggtacatctcctcgatcctccgcaccagttcactctgctccgtatccactgcagcagcaaacgcacccgccagatcccaccgaaatccatccagattaatcagatagtccacgacatctttgtatcctcccgcgatggcgacagacagtgtccgtgatccaaaccttgatacattagtatagcgcttcttcctcgcgtacttggccatacacttgaccatcttcagatatccattggccgctgcttccttcatttggatggtcattcttgcgctcagagccgaacatttcacgttttctccgtttgcttatgcgctagttgtggtagtcaatcgcgtttttaaatatattattacgcgataccgttcaatgtacttcgaagtattacttaagcatacggctagctcgaatagcatgtagagcatgcaaaatcacgttacagaagtttatcccgcagctaatggcaatctcgctgagccagattggcgtctagtatccccgagaaaatgttgcggggtccgcttgagaaataaaacaagatttcatgtatgacagggttattgcgctcgccgcatcccgtatcggaaggaatgaactgaccacacacaacacatttaatgagaactagcgtaccagcgtatactactcggccttggactcttcactccaatccgtcaagcacttcatcacggcttcgaggcgtcccgggaaacgtcgattgaagagctgcttgcaggtaatggtgcggatgtagttcctcactgggttgtttctcgcggcctccaacgctttttgcagtacggtgagcggcaactcgccacggtgagcactcgagacggaatgcacctcttgtacagcagttggaggatggcaaagcggtctcagaaatagcccctcgctgcatgctcgaaggcgtcgacaatagcatcgttcgacacttgctcgttctcgagcaacagtttgagtacggcaacgctatccgtgacacgaaagactctgtcgataaccggtggagacgggtgcttcatcctgtagagcgtcggtatttcgctcctttgccatccggaagtagctgtgttctcgaacactcggtcgaaaacttcattcgaaaagttgaacgaactccacaagaactccaccaccggaatggcagatcccattgcagcagtttcgaatgcttcgaccaaatccaaatcaatgcccttgccgagaatatacttgacagcattcacgtagttgtaatctgccagctcaacaagcagccttcttcccgtgccacttcgcgaatagatgccataaattctgtccgccaattcattcagtcccgcagcgagggctgctgcatcgtaagctccaatatagtccagacggaactcggccacgttcagattcagcagcaactccactacgtccatctgctttgctgagattgctctccccagggcaaaagagccctccccttcatccgcgaagttggcgaagatcggagtcgcctgtgctatcatgaacttgacgacgtcgagactccctcgtgctgctgcatcctccaacaccgcactggctgtgtcgtagaccgcttctttcctctcgagtatcctagtagccgcgagaatcggcagaaacacttgtagaacagctagatgctccttctctccagcagccgacactgcgtcgagtatgccacgccacttctcgcgggatggagtggcccccggcgcgaccaactcgcacaacagctctgcaaccactgccgcgtggccatgggcggctgcaagttgcagcggatccaccagtttgcagtcgaatctgcccaaaagctccttcacccacgccagttgaccggctgctgctgcctccgccatggcctcgtcgggtgtcagcaggaaatattcgagttgccataaaatgtgcgggagcgcggcgatttcagatggaaaaagaacgcccttgagcttaccctgggcaagaagggccggcggtggatgcgctgcgactgctccagcttcatctgcacgtacacgcgcgtgcttggaggtgtccgcagcttgagctgaatcctcgcgttgtcgcttggtcatgctgcaggtcagatggtgctactgccgctgctggatgcgtttcctatcaactagcgaaatgatgtctgcagctgaagacttttacgtgagttcgatttttctttcggcgccgttggaggccatgattataatcatggaaacgtacatgatcggaaaacatgatttgtccaggattgataagaaacatttcttaccgagtgagggagaaatagcgcgaccaatttagcacttgcgacgctcgcggaggaggcgaatgcgattgattctcgttctgaggagtcggcgtttcccaatcgaaggtttcccgtgaagatgccgagcaacgcacgcggaagcggccaaggcagtaggcctactgcgaaggccaaggtgaagcgaaacaggatactggaaggcgagagcaacgacgctcataccggggtccggggctctgcatgacgccaacttcagacgcgaccaagagcacgctcgacgacggagaaggtgtgaggagaagagagagcacgacaaagagcaagctgcgatcatgggtaactcagtgggcagtgatggcgatgatgagtacgatgctgcgggggctactggggtcctgctagtggggtgtgcgtctagccgcgatggtgatggccacgaagaacacggcggagacgacagtgcggcaatctctgtaagcgtggagcctcctttgctctggcacacagactgggctgcatggaagatctatttggctgagtactgcgagcgtaccaagcaagtgttgcccgtgaaagagaccctgtctcgtgcagagcgtatcaagcgcttaaagtgtactaagaaaggaaaagaagtctctatgaaagaaaacgatgactccctgttgctccccgaggcgtttgacccgtatcagcggacttacattcggacccacggttggaaaaagaggaagtcacgcagtgaaggtagtcgtccaaagcagcatatacggttgacgaattgcccgtttagattcgtggtacagtggaatttgtcaaggggcgagctgcaagtaaagcttggatgctttacccacaatcacccggtatcggctgctgcctacgcgacgtatccgacttctcgtggagttgacaatccacttgtagaagcacgtgtggaaggtatgttgtccgtaggtgcaaaatgcgctcgaatctacgactatcttctggaacacgatcagaatgtcatccaagttgatgtggataacatggtgcgtgagcataaatagtcggtgtcaagtgttgacgataacgaagctaccgcgagagaagtcgcgactttcgcagcagctgatccagagaacgttgcatcaattgcagatactgatgcaggtgaaacgggtgtcatgtcgctggcgagtgcacacatgcgccgtgtatatggccgatttagcgaagtgctgctagttgattgcagccacaaaacgaatcggtacgtggatttgtctctctactgagactatgtaacaatgatttataacgtgccttacctgccattgacgtcttagctacaactaccagctccttactttcatggccatgaacgagttcggcgaaggcgctgtggtgctcgaggcgaatggagattggcacatggagaaagctatcgcccactttaagagagcccatccgactcggattaatttggtgcgcgttatagttgtcgacaaagatctgaacgaaattcgtgaaatctgattttgggaagatttctgctgacgacgcgagccaagtcgacgcagcaatccacaaaatggtgtatgctgcttcggaagaagactacaaggctacgcacaaaacactgaagggcttgtgtgaaagaatcggtctgacggggtttttcgagtacttcgagaaaaattgggattcgtgccaagatcgttgggtgatgtatcgacgcgcagatctgccacactttaacaaccacaccaataatcgccttgaatgcttttttggaaagtttaaggatggagtagacagctccctgagtatgtctatgtgcgtgaaagctttggtcgcgtctgaccgtcgaatgcagaacgaatatcagtatcggctatctcgagttggccagttcgtgaacagcaactatgacgaagagatgtccaatgtgcttcgcattactacccactatgtagccaagcagattgaacagcagtacgcttgtgcattggacaatgtttcaaattacacgtttcgtaaagatcacggcgacccgagtctagtcatcgtgtacggcacctcttctgagtataggcttagaacggacgactggagatgtgattgtgggttctcgttatcaatgcgccttccgtgtcgccacgctattgcgtatcgcaagagcgaaaatttagctggcccgctaattccctggagccgtatcgacaagaggtacgatcagactgacatcacgataatagtacatcctaaaaactcatcagccaattgcacttgcaggtggacgaactcagaccggaaactggagaaggtcagacagttctcctatgagaagttcaaagatgccaactcgggtcgccgcgagcaacgagtgaagacgcacgcggagcgctacagagaggctgtgagggccacacatctgatcgcaactgagatggcagatattgatgatgaaagcgagtttgaggagatgctgcagttcgtgctaaaccaatggcgcaacgtacgccagcgtgaaatcgccgatttcgagcaattgtgcgtcgatgcggtttccagtcctcacgttcaccaccaccaaaacgcaatagatgaagatgcggaagccaaacgcgaattcgaaattagttcaagcgaagaatccgatcagtgtctagaagtggagaataggtcatcgagttgtgatgtgactggatttagctctgtgcacgtacgactgaatcccaaggccaggaaggtaggggcgccacgaaaacggaaatccacaacggctgctggtgagaaaggtgatcgaaaatggttcgaagccgctgaagcggggcgtaagtgtgcaggagaagttacattagtggggttgctgtctgcgctggatcgtgagcgcccaactcttgtagaaactcagcggcgtctgtccgggatcattgtcaagtacagcgaggcggctaccaagaaaccgaaattcaaacgcatagaaaatcccgtactcatcatggacgcgttctacattctcccctcaaagctggtagaatcctgtttaaaggtgctccctctctctaacactaaagacaccgccatagccgtggacgttagcttggaaactgacaccaaacctcgtagcaaggaaaacggagacggctttattgatacggttcagatcaaagacgtcgggaatttttcacgcatgcagatcgagacgttcaagaaagttcaagatctgaaggaatcggtgcaactcggagtggacatgcacaagtggctcatcggaaagggactgccctcattgcctgctaaatatcacgccttggcgaacaaagttgcagctgacgtgttatctgcgtacacgcgcaagcaagtcgacggcctccccaatcttcctgactttgaatacgctatgctttacagagcgacaccacccatgtggcttagtgatgcatcaatcgcggcgttatgccatcgactacaggatgactttcctacttgcagatttgctggatttcagtcagctattccaagcaaaactcgcacgagacgcagtgacgcggacctaatcgatgtttcgatccacgagcgtgttctacagcaagtccatgcatttggggtagacgtcgtgctgctgccgttgaattttccgaaggcacactggtgctgtgtgattatcaaggtgacggagaagtgtatactttactacgacccgctgaaccaagtttccttcatgaatacagcgaaggctgttgccccgcagctgaaaattcgaggtctgcaagattacactgtcctcgctcagtgtaggccaatccaatttgacacgtttagctgtggtgtatacgtctgctggatgtttatccaccaggtcgtcggtgggagacaactggacatgagcaacacctctctgacaagacgccgattcgagttgttctactatttgccatccggtcaacttctacctctgcaggatttaacgataccggatcgcatggaacacgacgacacctaagaaaaagatacccccaccgtccgaacatgcctagatcgatgacgcggaactccagccgtcagagctcgcgcaaaagctagtgccatggccacgtgccctagaggtttctaaaagcttagcactatcgccacaattaatacatgtaagctttgctccagcttccttagagctctcctcattgagacgtaacgattggggtgacggcagtcactctattttccaagtatcaaaccagtatttgcccatgatttctcttgcagtaattctgcaaagaaaggagaaccacagaagggtatcttccgcgtcctcaacgtatcttctccaatcttcctcagatggtactcactttagttaggaatcgctcgtccaggattttatcctgtacatcgtcatggacgtgtccattactataatcctggcctccaacacctgcctttttcttttccctactgatatatacaatttaggcgaaattactcattacattttcgatgcggatttttttagcgccgcaagtataaggcagccaaggatgtttacttggataggtttttattgtcagccaatgtaaaacataagaaacttcaaaacgtttgggagggcgaaatgtcaccacgtccgatgaatgtgcaaaagcacggcttcaatcacagattcttacgcagtccttgttcaggcaccgtacagcggttaaaatatgaaatggaaaaaaagaaacgattggtcactatcgagctggttatcgctgaattttgcatggtcgaccaatgtcagggaaaggagttatttgcagatgcagaactctaaccacctttgtcgaccaatgtcagtcatttcatcagcgagtcaacgccaagaatatactcaccttcttagccaacgaagttaacaatgtaccccaatgcgaaacgaacaatgtgctcacctgacaatgtgctcacctgacatcctttttcaacatcaaccttcattcacatttttagccaggcactttgatacgacctgacataaagaaatcgtccggcaaccaagtgcgcgagttgtatgtaaatgattttggctatattcctgctgaatcagtagcgatggcgttctaaaagctcgctggatgcggaaacgatagtatgctcatcgaaacagccggctagagctacttgaggtcatgtacaagaagacatctgtaagtagccacgccgagacagtgaacctcttcagctcatatccattttctgataaggagcttgccacattgtcatcttccaaaacgatcttcatgggggcaaagcagttcattcgcaggttaggagcaagttgcctggcaagtcgtagacttgttaaaagtaggaagtaggtggtgacatcctgcgaatgaaccggtctggcaacatcgcgatgcatgatagcgtgtacgcgctggggccccatgaagtgtaggaagtagtgaagcgcgtgcaccagttggagcggcggtacccgcggatcttgacagtcgtgactggagcgagaggtggtgtcgtaagctgcgggacaagcccatatccacaaacgtgggacgtgactccgcacaggacagccaatccgatgaaggaaccttgcacccagtcggctaggccgtactgggacgtggaggagaaaagctttccggagacgctgtcatgtcctcaaagaaaatctgcggtcgagttgtgcatcccgcgtagattggctcgtaatccttgattggtgaagaagtaatgtgaagcaatggtcgcttgatcgccgaggaaatgtcacgcgaacacaataatgccactcaaatgcagcgaactcagcggagtcttgccaccaagcatctggacagcatcgtgaacagtaactggagtgaatacatcgatagtgaaatcaggcgcagccgaagatttgttgacttgggggttcttctcgacaagatccattgacttggtgtctttctcaacgtggtagtgcatgaaccatcgtttttgaaagcttccagctgaaacgcagctcagggagaggagggtagcgagaggccaaatcctgacgtcatggctcgggcatccgcaggcgtgaaagttttgcagcacttccactgccatggccgtgtcgctaacgctggtcctgttaacaattgcaaataccacaatgtgaaccccaatgacgtacgtatatgtgcgttggggccaacgtggtcgtcggtgttggcagtatgggctatcttgttgtcggccggatagcatgaggacagggctcgtgctgctgtcatgtccgctggcgacggatcgtgttcgatggtcgtagatgaccatgctcgcaggccctggatgacaggaagtctcgtgggcgttcagcattggaaagcttgggctcgtgctgcggtcttgctgctgccaagtgcgatggtcgggactggatttggtcagtccgtcgtggcatcatgttcgatggccagagctcgcgctgctgggctgctcgaaggtcacggctcgaggttcgatagttgtagatggacatgctcgatggaaggaggtcgtgcatgttcaccgtttgtgcatgggcaggtagccatgccatcgtggaggactgtggccatgctgctgtcatgcagctgtcgtactgctgggatgctgtcactggtgtgacctcggaattagttagttcagcagagattttcgtcttcttgtacatgacctcaagtagctctagctggtcgtttcgatgagcgttctatcgtttctgcatccagcgagctttttgaacgccatcgctactgattcagcaggaatatagccaaaatcatttacatacaactcgtgctgtgacggggtcacacagcacaatgcacagaggaagtgcgtgcaggtgaacagcagttcaccagttcccggcctcaaagggaacggtttgctacaaaggagtaggttataagactgactgtattttggtagaggttaacttggtcgtaatacaaactacaagttaactatacaaaagcacacacaaactcaaatggttggcttgcggagctactggtaccatgtaccatgtactcgggagagtgacacccgtcactcttcatgtaatgggtacacttgattgtgccccgttatacgcgcacttggttgccgaccgatttatttatgtcaggtcgcttcgtcatttgctatacagtcaaacctgtttatatgagggtctgttggtgaccatctactacaatgactcatataaatggactcagttaaaaaaatttatgtggtgcacgtaaagaaatcgtgcatagttcgctgccgctttgccttcaccgtagtctctcgaaccaaagcggtcacggtctataaagctcttcgttctctgtcagtctgctctccgcattgcagcagaaatgcagccagctccatgcagtgtctcagagcaatggcaggttgaactgcgggttcctgttcctcctcttcctcctgctcgtcctgcgaaactgcatcacttcctgccgcttcgtccactagcacatctggctcgtgcacaggaacgtcttcgtccactgccagatactcactagcgctaacagcgccctcccacctcgatagcatcgccgttaactcctccatctcgttgctggatacctcctcaatgtaatccgtgtcagcacgggtccttcctagcatctttcctcccaaaatgcgagtcttgacccagcaatttgtaattgtcgttggcgtcacacccgcccaagcatcaatggagaattggacagcttccagtacgttgagcttgcgtgtaatgttagtttcaagtgcatccaaacaccaccgcacaaaatactttcggtaccaagccttgaacgacccgataatacctgaataaaaaaaacaccgtaatagagttggttagtttaggctacaccacaataaagaaaaaatatttacctgcatccagcggcagtacggcggatgtcatgttaggagggaggaagtgaacagtcacatgagtcaggtttcgtagaatcttgtggcatgaagcattgtcgactagaagtaggaccttgcgattggcggccgccattctcatgttgaagaggtgcagccattcgtcaaaaatgacggatgtcatccaggcgttcttggaggacttgtacaatatagatttacctttaatcgccgctccctttttaaagcacctcgggttcttggccgtaccgatgactattgggtcgagcttgtcggagccagtcgcgttgcagcagaaggccaaagtcaaacgttgcttctcctttttcttgcccttgcgaatagtcgtagctagcgttcgattaggcgctaagcgatagaaaagcgccgtttcgtcgaagttgaacacattctcgggtgtaaactgcaccaccaactcttgtagctctagcctcgcatctcgctcttcatcagcttctacagcgccaccttcgccgtgtagcgtatgggagcggatcccattgcgcttcttaaagcttggaagccagccgttgcttagccggagctgcgtggcatcgatgcctaagcgctccgccagctcatgcgccttcatcaggagcacgtcgtccgccatcgccgttttagcttcgttctgaaagaaaaattccctcagttcccgctcgaactgaggcaatttcactcggcgccgcttggtcgcactcaggtcgacgtggctgaagtaggaagaaggcaggttgcgcagtcgggcgagtgtggcacggctgacccgggccttgaaagttgcgtagatccactcggcgagcatggggttgttcatgccaggattctgctagagctttaggtgcgcttggagcttttgttctagcgtcagacaggtgcgaggagacatggcgagcgaagaaggcttgcggtaggcgttgagtgttgagcagtggtgtgtgtgtggccgtgagcagtgcgaatcaaataaacaggtgagacctaatttggtcccccaaaatgtgactcatataccttgtatgcatataaacagagatcatacaaaaaaataagtgaaatatttggtagcgacaaagcctgcatcaaataaacggcatggctcgaatagagaggatcctatagacaggtttgactgtaccatcaatgaacgtcaatttctggatgattactgtaggataaggaagctttctcccaacttggcattccttgcgcttctctgtcattgtatctatccaatcaggacaagttcttcaatgaatttagccaatcacgatcgattcgtgtgtatcccaacattttcccaattattttgggaatttacagtcttgctagaataatgtccaatacaaaagtttagtgtaattgttgcattactcatatttgaccgcaaattcccaatacaaatcatgattgtatcgttggtggctgtgactcgtctgctttctctcctctcccatttaaaatgatgcagcgggcgccgagagggcttgacatcccgcaagggacagcagggcaggaggcagcggcgatgaagtgcttcagcgaattcttagctcttgctaacatgaatgaggagtcaattgctagtattgcgaagtcgctgtctattcctgatgctctaccaagtcaaaacttttactctttgctaaccgccttctccattttcttgcaaactaagccaagtgctcgaggaggccgtcttgctaaggctactgatgtgggctatatgtcccaagttgtgaacctactccgagagcggtaccctctgtacttgtcagacagcaagcgaattgcgaaaatacgcgacaaaatgggttcaactattgaggagcgaaatttgctagctggcgtgcagactggtgaagctccaggctgcacgctcagcgacttgcgtgttctggtgcaggaaactgcgattaagggggttagctcaggttataagagtttgcatgacgctgctgtactaacgttaatgcggcacacgtttggtcgagtgatcgatacctttttgctaggaagagccagctatctatggcggcatcgggggagctctttctgcatctagctcgaatcaagacttcggtggttcaaggcatctcaatttacaaggccgcgacttactgggagcagtgtatgctgcacaacctcggaatgctgttcgtcagagcgtcggagccttccagctatgtgttcccgctagtgccgcacgcggcggcatcggatttgccaggggagaagacctacagccacgacgaagctatactctactgggagaaccttgaagagaaagctgaaccaaggaacgagccaccaacaaagcgcgtgagaggaaggcccaacgtgtccaagtatattaacgacgtcatcaccatggtctgcgagcgccaagcccaggcctctgccccgctgcccccgacgctcaccgcagggctgagcagccactccttgcgccgcggctccgcagcgtatgcaaacgcctcaccgcagcttgcgatccagtggatctcgacccggggagcttggctgctggactcgctcacgaaggcgttcgcgtacgtgggtaccacgacacgcgaggaccagagtgtcggcaaagtcctcgctggataccgagacccgcacctgccatgcgtcacgcccacgattgccaccttgagcgagcttcttcctgcgctcgagtacgcccagctgctaaccctgcgcggccagctcttcaagaacgtcaggagcttcacggacaccacgctcaacgttgatgccttagtcctggatgcggcgctcgcgtccctgctcatccatcttgacgacgtcgcgacggcagtccagcaggagcaggctgccacaggcttcacatcgcattacctgtaccgcttccacgaagctctggacgtaaccaacgtagcgctgggagctcggctgtcgccagacacgtgcattggttggggtcggcagcttcgcgcggcttggcaaacggagaacttcggacagctgggtgaacgcagcaatggaaacacgaccatactagctgcagccgtcacccagacgctatcgtccatcacagcaatgcagcgcacacttcagaagctcgtcgcggtccacgagagcaagtacaccagcgctgacggccctgcttcttgtcgctgtgcgcgccagaccccgcaggcgagcactgacaccgtcgttgaagcgcactctcttgctggctgcttctacaactggtacacactggagctgtggcacacggcaacccaaaagaaacaacagtttgttcgcgctgacctcaaggcaggcgtcaacatcatgatcatagcagcagggcgagaggtagacgtaccaacggcgccactggatcgggacggcgtcgcgtatcggctgtggaagcagcgtgtctggacgctagcggaagacttggacaagaaggtcaacgctgcgcttgggagtatcgacggtaaaggccggtccaaaaccgcggggtcgctacggaagcgctggagaaagctgcgcgttgaccaccgctctgcgtacgacgcgctctgctcagcatttatcacccccaaagcgaacggtggcatcgtcgaccgctgcacaccagctagtcaccaatggaagcaaaaaatcttggagtcgtaggatcacgcagcttgtattaacggttaattcattcctattcatacaacatggataatcgaattcaaggcccgtcatcgccatcccacaacttaagcacagcgcatgcattcccgtcagtcccgatacaaagtcatacacaatagaaaaacgatcacataccgtcagcgagtgcgcacgacctcgtgcttggccgacagctatcaaaaccggcagcataacacccgccctgccgggttttgtagctgctttcgcgggtccttgcgtggggcgcgcctgggggcactcgggtctggggtggtcggcgggggaggcgtgcggcatgctcggagcgcgctgtcgtgttggagatgcggggcggaaagtgtgaaggcggagaaggcgtcgcagctagccaaaaataaaaccttaaggtttttcttggctttggagccgataaaccagtccatactttgttgaagtcatttggaatctcacttatgattggctctcctcattgggagcggcgtttgggacctggtcgattaatgcacagtgatggccaaaaatgtattgcaggtattgacatttaccaatacttattgcaatgtcatactgcaagcttgcaagctattgcaatacatattgcagagcgctgcggaattgcaattcttactgcagtcttaagccaaccaaataaactcttcaaaccctagtacttttcacttagaagcaggcaaagaggtcaatgtcaagataataatgttctcaaaacccagttccgacggcatatgtgctatcggcgacctctagtagtatggtttatagtattgcagtaattattgcaagaacgaccagtattgcagttattattgctggctgccttggtactgcaattcatgttgctacagatcgctttacctccaatgccttcccgtacatttttggccatcactgttactgcatacttaagtatatttcagttacaacttcgtagctactgcagtactacgatacatataaaataatacttcgaagtagtaaaacataatcgttgggtccaccatattcgaatcgttgccatcctggtcccacgtcgtccaaaagcagcaaatgctgatattgatcctcgtccaaatagcgccgaatttgacggaagaacccgctggggttgaaacccttgggtgccgtcaccgttctgccctcgaactaccatcttggcgttgtgcgatgcatgcacgaagaaacatctgaaggctttcattgcgagtagcactaagggcctcttggagagtctcaattgacctctctctgcgcttcaaaaggtgccgcgtaaccttatcacggtttgcgcgagcggcagcgagtacagcgtcctgctccgcggatacgtcaatggctggtttgccctgcaaaaacttcacaaggcgcaaatcaccagcgcaagcagccctcacaaacgctcgagtcacttcttgggaggaaatctggttctcctggaataaagctcgagctgcgtggagatttcgcttattaattgccttcgcaaaagctgcgcaacgaacttcaggcgtcaatcttgagtcggtgcccaaagtctgcaatatttctgggtgaaactccagcgttgcttgtgcgacgacttcattgatgatggaaacaggaatgtccgtccggttgagtaagagctgaagtttcttagttgtgccggtcattgtcccggttactgtcgagtagcgttcttaaacattgcgactacagactctgtagggatgttttcgccgaaactaagaaacttgataatatcagcgccattcggtttcccagatgctacagctactgaggattgtgacacgcgacgctggccccaaagggcccaaaggaacctcaaggttgtgatgacatccgacgctgcagcgttttcgaaagctgagtcaaaagccttaggtgaaatcggcccactgcccagcaaaaatgcaacgacctcggttcgtccatgacgggccgcctccacaaaggttacctccggattggatcgtatacggaactgatcagagatttgaacagatctccgaaaaaggtgtgctgggggctgcacccccagacccccgcataaagaaaactaactccgagtgtgcggcaacgggtccgttcgctggaatgctcgtcgctgggcccgcctccgcaaataccgcgcggccctgcttcgcgggcgccccgcgcgggtttgctgtggctacgctcctcgcaaccgctcactgccgtgccatgttttgcccatacaaaaaccaagataagacacctgttccaatctctgatcaggtccgtatacgatcacaaataaaatctacctccgcaaaggcatcatccaccagcgcaggaccattgtgcccgctgttgtaaaggtccgtgaccactttcaagttgccgtcaatagcgaaattacaaaacaaacttttcccatccaactccggcgagctagcataaatcaactgggcggtaggatcttgtccttcggtaatggctagctcaagtaccttcttataatgccaccagtacccctcaggctcgagaaaaaactgcacgagttccaaatgaccccctctaatggcgaggttcagggagtcagacgcttcacacgcgtgctcataatcaaccttacaagcatactccgccgcaaactccacgacctaaagatgtccatgggcagatgcttcttcgggaatttcccacgccgctttatgtgatggagcgagctcgtcatcgccactgtcatagtcgctttcctcttcacgctcgtcttcacgctcgtcgtccgcttcaatttccagcaacagcaactccaccacaaccagatgaccatttgaaccagcagcagaggcagcttttgtcaggacctggcgacttgcatagtccagtttccccgtctgtgcgctgatgatttcaagcattaacactctcaccgcctcgatgtagccatttctcgccgcagcgatcatggctgcgtcccgaacctttacgccatgcccgtccagtagggagcgtagccattttaagtgactggtgtttgcagactccagtatggcttcctctgggctcattaagaacacgtcgatgctcttgagaacgtgaggcagcgacgcgattttgacaggcgcttgagctccgggtcggagctctcgacgcctggtttgccatatcgtgcacgtttggtccccttcatcgggttgtccggaggaagcgcgctttagctttcttctttcgaatacccgaagaattgattttctttgtggattccgaatcagcggtatttcggacaataaatatttaggtttagatatgaaaaatcatttattcgaatttaaatagaaataatagttttgcttaagtacgtttattaagtacgacctgccacaaggaaaccgtgacaagcattgatgttgacacccactcgacacgacacacttccgcttcaccgcagcggcgctttccagtgacgatgggcgcgcttccagatctacacaccgacctcctcaacagcgctacgccccttatcctcggcgcgacgccgcattcgaccaggaagagccgcaaacgagggacctcgcccaagacgccggtgccgcacccgatgacggtcgcctaggcaggaggccaggcccaatctgggggtacttcaaaagactcgacggcaacaagtcgcacccgcccgcggagtgtcgcggctgccacaagcgcatccccactgccatgcccaagcggaacctggtccggtgcccggcgatatcagcagagggcaaaagcgttatccggagggagtacggcgtccctgatcgcgaagaagctgccgtgacaccgccacaatcagctcaacatagcgcagggcccatgtctggcgcaccggtgttgactgcagctcgtgaggtccagatggctacttccagtcgcttgacccaagaagagttcgagatgatggtggtgcgcgtgtggtacaagtgtgccttgccttgcgtgcttgccacgctgttcatcgtgttggcccctcttttgacgctgccgtcaacggttaagctcgcgaatgtgttgattcccctatgaggattctcctccggaaatccgagtgaaaggaactcaagttctttgtcaaggcccatctgtctgtacgatagattgggatcgacccaggggtttttacgcttatgctttcctcctccgcgccacagtagtgagcgtgtgtgaaatgaaatatattactttggaatctgcatcctaccgctcaagtgtcttcccaagtgtcttctcgtcttgcgtcgcgttggcccctcatttgacgctgccgtcaacgctcgcgaacgtgctgattccccgcgtccaggcggaagctgggaactttgagtgagagggagatggaggttctaccacttctggcacattgtctctgggatcttgcaccaagaactcggtactagtactggcagggctctatactactttttgtctcatggcatcatggattcttcgaatttcagcttctggagcaacactgattcatgctctttcgtaagacgatacttagccccagaatgcctatcacattttcagttgctgatgcttcaggttccgatctccttagttcagacttgacggcatcgtcatcgtcgacagcatcctcttcatcatcttcatcttcttcttcttctggaggaactggtctggtcgcgggtgttgccggcggtgtagcagccatcttggtggcgatcgttgcaagcgctttcttcttctggaaacgcagtaagcgcaatggcaactccggcatgcgaccactgcgggagcccttgaaccacgctgggaccggtggcactgccgagacggatccttcatcgctaggcacgggactctggaatgacgacgctatcatcgcagctcgtgtcccccgcgacaaagtgaagattccagacctgattacccggggcggatgcggggacgtttacctggggacttacaacagcggagcagtagccatcaagatgctgtttcccgatgcgagaggtaacctcaaaaaggtgaactcatttctggccgaggcgaagctcatggctggcctctcgcaccctcacatcgttcagttcgtcggcgtgtcgtgggattcgctgaacgatctctgcgtgctgacggagctgatgaagggcggcgacctgagggctttgctaaaacaatatgatgagcgcggccatcctcagggcttcgacaccctcaagatccgcatcgcgtaccacgtcgcccaagctcttatgtaccttcactcgctgtctccggctgtgattcaccgagacttgaagtcgaagaacgtgctcccgacggaggatctaacggccaaactgaccgactttggggtctcgcgcgagcgacaggagaacacgatgacggcgggcgtcggtactttgctgtggatggcacctgaagtcgtgatggccgagcgctacagtgaggtggcggatattttctcgttcggcgtgatgttgtccgagctggatttgcagacgctgccctattctcacgcgagggtggacacaataactgggaagaagatgccggacgccgtcatcttacagaaagttgcgtcgggtgacgtgcacgttgcgttctcatcccgctgcctgtcatcggtggctcagcttgcaagagaatgcgtcgcattggagccttccaatcgtccgtctgcgccgatggttgtctaccgcctgcagacgattatgaaggaatcgtttcgaatgtaagctcggcaattgccaccggagcagtctgcagtgttaatgttgtctacattgtggagtgagtttgaaaaatacatgatattcattttggactgggatatgctattcttcacacctttttgagttgaggtacccacttttgggcgtctacattacttctgagtcgacccctcgaggaatccccaccaggatcaaacgtagcgacgtggatatggagcagaacgaaggccaacaagacccggagagcgacgtcgtgactccatttgccgaactcaaggaagcgtatttccccgctgccgtagtcgctcttccccatattacaaggctcattgaggtgttttcgatggcacccgcagaggccctaacggaggcaaccaaagcggggcaagtggactgggttcaaaacctattaggtcgcttcggattcgacatctcggaggccttggtggaagctgctagcaagggtgattcggccattgcggggctcctgatggataccttagtcggagctgaagacgtgcaacaggatgttgtgtgggctatcgagaggtcgggtgaggctgcagcccagaacggccacctacgagctgccgagctcttttcccacgagatccggtactactgccggtccctcatgccgaccctagatatgctcaatgcggccgcggcctatggacatcttgacgtggtcaagttcgtcatcgagcaagcagaacagggtggttttgtggacgagtactgccggttccctacgagcgatacgctctcccgcgcgatcacgggaggtcaccctgatgttgtcgagttccttttgactcatgaaaacctccgatggaacctgaaagaagcgtttttagccgcgatgaatcagagagagcacgctgttgcagagcggatttacaccatgtaccctcaacaacacccagggaaagatttgttcatcgagctcgcactttatggatgcaaggaagccgccgactatttgtacagcaacgtctgtcacaaggatcccagtgcggtcaacaaagctcttgaaagcgcgacagcgggaaatcagacctgcgtcgtcgaattcttgctggatatcattgcataacctgatgtttgccttcttttcgtaagagtgtcctcattaaaaacaagctgctcttgatgttgcggtatcgatttctagtataactaaaggcttctctttcggtactttgattgaaagcagtaataattgcgggcgtctctatattttgggattgctccaatacatgtgagaattcatctcgaagtagtttggataaagcgaaattcaacccacatgaaaatcggaaactattctccgtatgtgttgtttagcgacgttcagcagcggctatcttgccagtggctgataaagtcgttgatccctgcagtgaactaagtgtgaaaaagtaccgatccctgcgccagaacgcagacactttcgtgcagtagaaaaatgataaagctgttcagtctggtacgagttgcttcagtggccgctgtcggaaatattgtgacttcgaccttcattcacatttttaccaatgtgaagtgattgatcgcgatcaagttgatggaaacatatactacggccttatttgttctccttagggcagtcttcaaattaccccgtggaaccaagacggcaacttagatcgaagtaattcaagatggaggcgctggacggcttgatcttatcaagatgttatacactttgtctgagctggccaaagcgcgtactagctgccttccacgtctgctagcagcaggggcggcataaggtcgtttggatatcttgaaatttggtatcgagaagactgcagagcacttactgtctgcctacggcataccacagccagtatcagacgacgcaagcgtgcaatcgcgactcattcgaaggttcatgagccgtaataacgatctccagcgttggttccgcgaagcatttcaccaagcgatgtaccatggccaccaacgcgtttccgacgtgatttacacctgtttcccgtactccaaaagagggaaattgttcgagtttttggtgcggatggacaacgcgagcgcagtggcatattgcttgtgcaacgacaaccgtaggcggcccttcaccaacacgcggaagtgtatcgactctgcggtaatgcttggggctttcaacattgctgttctgcattctcggtgcagcgtgttgcctttactgttgaaatgggagcagttttcgtcggaggttttggcgtcggcctttagaagcgctatctggttcagatcgacgaatgcggcgattattatttacgaaacggggtgtatctgtccgtcgtttctcgagtctctgttcgaaagttcgtcatcggcggatgaaacgcttttgctcaagatgaagcaattttccgttgatgtcttgacgcgggcttttgtaatcgcatcgagggcctgtatcggacaacggagccaggcgtatgggaagatcatcgagcttctgtgcgaggggaaagacataccgatggaaacgatcgagaggaattttgtggctgcagtgaactctaactgcgaccttctgctgtatgcattgcggggaagctgcatgacttcatccgaaaccatctcaagcgtttttgaaagcggtgaacgtgttgttcaagtgtggctacatttctccttctctggctgccggggagttagtgagcgcgattcacaatgacaaggttctcgtcgcaaaatacctctggggtcaggcgtgcgttccccgcgaaatctacgccgaagagttcctcgctgctgccaagattggcgatttgaaggtggtggagtggttctgtatcggccgagcttctcgtgagtccattacgacggctttcctggctgggatggacgccggccatgtcggcgtggcgaggtgtttgtacgacaaacaacgcgcgtctccggaagtaatggacggtctggtggagcaagcccgcgcgtcgcagaacttggaggtcgtgtcttttttgctgggaaatttagctgaatccctggtttcacttcgaattgaagtctccagacaggaagatggcagcggcacatgcacaatatttttcggataaattaaacaagcatctaagtttgcaaattgtcactttgaagatcacatgcatgggatcgtaatatatatatatttaccagaaatgcaagtaatcgcgtggtgtagttttgaaaaccgtacggactttgagatatatcgtccataacatctcacagcagttcgtttttcagtatattctttggttgagtcaaacctgaaaggtcttagaccgagagtgagattaggttttgcaaaatatcgtctccccaacaactttaaagccacgatgtaataaaaatgcgcgttggaactactgagaaagacctcagatcaagaaaagtgaagtacacagaggatgaaaatgtaaacgcaatcgtgatgaacctccctgcccaaggttcgggtgagtcaaggctcttgctgtggctccaacttttccttggcttcgtccaaaatcgatcccagcactcgcagcgagtcggtgcttgaagccttccccagtcccatcgattcgcgtcccgtcgagtacattctaacgagcgcaccaaattccagcggggggtccttggtcgatgaggcattcaagaatcgcttctccagcacatttaagacctcgcaagcttgctgttttctgttgatcgagacgcagagctgggccgtgctcatcgccatcctcacaaagtcacgcgttgtcccacagagatctcggacaggagaaagaactgggtccttgatcgctgcgtggtcaacctggtggaacttctgcatcatgtgaatcacttgggaggcgtctgaggtgacagtcttccttaagtcaaaacttgtgtctgcaatcctgtttggggcggaaagctcgatggttatctcccacaactcgtcgatcgctgcacacgcatgcttgacgtcgtcggatttgcaggttgcaggaatggttgggtctctcaaacgagtgaacgtctctaccagagcttcatcgaccacgccggtgttttcttgtggttgcgtcgcagctctcgttagaaacttgagtaaacataggctttcttctgctggaggatcggaggtagagccgctaggactagcaggactcgctttcccactcttgcctttcttcccctttttcttcgacttctttctcgctggactcgatttgttttcagggctacgtccgctcgaaggactgggctgctggtcacgctggaaatatagggagggttggatcttgacggcttggttcttcctgtttttttattgccacccatgcgaataccagaaggctccatgaatctcgccatgtttacctctgcggcaatcgatcgcgaccactctcgatccgtggtcatctccgaaacgtgccgtcctctgacctctttacgcgagatgtcagctccaaccgaacgcagctggcgatacagtgaccgattctcatgcttcactacaaggtgcgcgatggtttcctttgtgtggtatgtgggcgtattcaagtcgataaggttgtagcccttcatcgcagcactgtggacagccatcgtattcggaagacagcctggcgaagaatgacgaatgcgaggagcggctgagggacgagtgggacgttgaaccccagcggaccctggagaccacacggtcgccaggatctgctgcacgtgtgcggcgggcatgggactcaggacctcgagcgtcgagctcactcttgaaatagacggcgagggcgcagaggcctcggcgacagacgcagctcgggagcaagttgcaggacgaatgaacggctgcttcggtggacgtgctactgggcaacgtggtgagtgacggacaggagagcacttggcactccgagtcttctgtggactgcgaagtgaggacgggcacagcggtggtgtacgtccaagtggtttagagggcgacgaagttgttcattgcgtacgtgtctaggaagtgcgtgtattgttagttagtcaacagcgccggctgctacgagtttggcttagtttaaataaaattggttgcgttgccagtcgggcacgcgccggaggggtatcggaagttccggtaccgacggcctgacggactttggctgagatcagcactgtgacgaccaaactctcgcgtgcggagacaaccagcacgttgcactttctttcgagcaaccgcatcaggtccgagaagacttcctctcgggtttcacgctgggtcttgattttgaacgacgcggtaccaaactgttgggagacgaagtctggataagagggaaacgtgaaatatcggcgttcgatctctggaactggcaccgcaaatttggcgtgaatcagcgcagcagccttcgtggccattgtacggactttttcaccattcaaagtggcttctgagcgagtagaaatggcagcaggcaggatgtccaagtcaagtgagccgtccggctgtaaagcgtccaacagaggtagcagaggaaacatcactgcattctccagggcatcaatcttgcgttcctcaatatcgtcactgcactcaggattcccaatgtagtcactgcaggcatgctggatcaacagcatgcctgcaatgactacattgggaatccaactccgagaagacatcggcaatatcataaagaagcgccatcatatctcgagatagtactcgggtgccaaacatctcggccgagctagtcttcacagcattgcccttcatatcagccagactggaacttgtgaactggcagctgtcgttttcgctaagaaatcggcagatcttggatacatcgcgcactccaaactccttctgctcttttgtccagtcctgcccaggagaaacaacactcttccctgaagtagcgccatatcctgagtggtggatgtaattgcaatcatacgcgccgcgcaccactgcagctctcgacggagtgaaaacccacgtctcgtatatctccaaaacgtcttcgattaacggaataggctcgagaaattcttgccccacgagagcgttgtacagatgtccaaaggctcgaaaaatcggtgctctgagcagactttgatgtcctgcacggagatagccgagctggaagtccagcactacgaagcccgccgagaacgggttagtgcgcttgacgaggcgcgatcgatttgggagcagatcatcacgcgaagagtctggtttaatgacatttaggaccgtgggtctgtccacaagtgtagccatccgctgcatcaactcgtctgcgtggttcatcgtgacactaatgttgcgcccgagccctccgtcgccttgcaatgcagcgacagatttgacccagcaagtccaagcaaaaacgagcgggatggtcacttggcgcgtcgcaaagtagtcggtcatcaagcacatgaacgcgccctccagtctcgcccttttgaagccccccccccccccggttatctccttcttctcgctgaccgtgttgtacatcaatgcaaagctctgcaccaagaagtcaataatatcggtagttgggagcacgtactgcggcgtgcgttcttctccatatctttctcgctcattcggtggcagtagaaaccccgccctggtgcttgacgggagaattttcgcaaacgacgtcaaagcggcccagatgatctcgaagtcccgcaccagctcgaagggcgaggacatataagtcccatccttgtcgaatttggccttgatgctactggccgagttggccgctagaccgtaaatcgcaggggtgtgcttcataactgcatccaacaagttctccatcgttcgaatctctggacggcgctgttgaagccgcgtcgtgaggtcagtggccgtgtccatggccagcttgatcgccaccgtcgcctcgagcatcccaccgccttcacggcagtgtagatctcgtacacgcccctcaccagctcctccagctccaagacgaagaagaccacgtccagcggcaaatcgtcggcgaaggcctcctcgcacagccgcgttttggcgtgttaacatcgagaacaaagttctcctcaccacctcttcttcatcatcatcttctccctcttcttgtccctcatcagactccagcgccccacttttctcgtgtggcaccttttcaagcgtgcggtgccagagctttagcagccgcgagagtcgagtgccaacgtcgcgattttctatcgtttgaagcaggaactcgtccgccgagcagattttgagggcgcagttgcaagccgccagagccttgggcagatcttgacgcagcttgtcgctgaggcaggacggatcgttggcgatctcttggacgactcgactcagtgtatccaactggacgggttggggggtggggtggctgtggccatgggcacgtatcaaccagtcgagaaagaagctggcggcacgctggtagcggtcgtacttgaagatggggatcgaggccatccgggacctggctggagtgcgcttgggtcggcgaaatcaggaatgaggttgaagggtgacatggaagatcggcgatgcgacgataatgtgtcattagttacgagttattacttcaacgtaaactctttaaactatcttagtaggtatttgtgcgggatttcccgtggctgcgctccgaagcgatagacctactcgcttaatcagtggagtacaggtacacttaaactatattcacgaaatcaccagcggtgatccatgtaacttcaatttactttcacttttacggtaatactagcactcgttacaataaaaaatgaagcgctgctcacagccttacaaccaatagctactcactcctcagtcacccatttcattgtcgagatcaagtgaccgcagccgccagacgctctcacttcttgaggtcttccactgaaaagctgctcgcaaatcatcgtgcggatgaaattctcgacttcctcgttccttgcagcactgagcgccgccttcaagttgtcgattggccagtcttcctctttactcttagtcagaagagagagaacatcgagcttgccttgcttacttgcagtcaggaatgcctgcaatttgtactcgcgaggtacgttgtcggccgataaaaactcgataatggtactagccatcctgccatagccgtagttgtgaacattctcgagcgccgttaccagtacactagcagcaatagactgctggctgtacagtttcttcaccatttgcacttgacaacggcaaactgctgcgacaaaagcttcatgtacggactccagaagaagacgagcatcagtgcgcaacagctccaccacatcgtctagaccccatccggccgcactcacaaacgcggtcccgataagttcaggcgagatacactcctgcgtgtacaggaacttcacgatgttggcttgatctggacatgcgcaacgagcagctcgcttgaatgccgtgctgatcgaagcagtagagatattctccctctctttctccatcagccgcctcatcacctcaacgttgcgcgtactttggaaccactggttaagcatcggcacagatgctcgcttgaaactgtacagacacagagctgtgttggagttggaaaccctcattgcgccctcaaaagccgtttggaaactatcggtcgagacaattcccgtagcatgcagaaaccttacgacgtcacgcttatctgcgtagacggcagctatgaaggcgtcccccacgattattggatcgtttcgcccgttgttgtagaggtactcaacgccactccgacgcccttgtcgggctaaatccacgagcagcttgccgttcgggaacagcggatacacctcgtaaatcttttgcgctgtgtcggcctggttgtcttggaccgcctcttcaaaggcatccagcaagctccattcaaagtcatgttgttccaggagaaaatccaccacagttgcctgcctcgcgatgatggcacgaggtagagcctggctcgcataaatagccacgtagcgcttgatcttctcgtacccgaccataaacttcacgacaccaagttgcccattccccgccgcctccacgaaaatctttccgatctgttcggctctgcgactagttggatcgcggtctacaagccgctgcagtagatactcgacgatgtccacgtatccttccatggtggcagcaatggccgccttcttgacagctttccacgcgtcgtccttgagtggacacccgcaataatgcgcttggtagagcgcgtgcacagcttccaggtgaccgttggcagcagctacactcatggcgtcgagtgtagcgcagttgcagcggcccaacagctcccacagccagtcgacgtctccgatcctagctgcctcaacgacggcatctttgggcgacatgaggagcgtgtcaacttgtttgaggacatggggcagcgccaggattccgtccgggaagcgcgcgtgcttgaggcgtcggaacggctgcaggcccgtgtcgcatgggagcagcctcttggcgcggaggtagttgccctcttgctgggggcacactcgcttggcgctgggggagggggactgaggggcgctctggtgagtgcgtgacctcgtgacggcgaccatcgtcttgtcccgtatctccgtcacgtcagagctcgagcttgaaggtgtctagttcacttcgcgcggtacaatttctaggatgtttgaaatgaagagttgtgattggttgactgggctcccgcgtgttttcaaattgtcaaccagtcaattaatgttgtgggaaggtcgtacgtggtgtggtacacattagtcatggtcaagcaaatggctatggcgccccaaatgctgatgtatgtagagagtccataacgttcaagcgtgtcacgcaaccccttaccaacgagggggctgaccggacactcatcacaagtgagcgcaactacagtacctgtatctgtcaggttgcacatgcatatacaccatcacatcgacaaatttgacttcttgcacggagcaaagttcgttgatgtgatggtattccatgtcgagccggtttttcgggttcccccgtgcatcgagactaatagggccgtggactccagtattcatttccgattctacggagaccctcccaagccgccaggcgtgttttctagtactgctccttgccattttcgctagtgcccaagttgcctgtgctgggaccggttccgaccgcatgctcaccaccgctagtgcacgtcgataccttaaaggtgcggatgccgacaccgaagagaggttgagaatcctagggctcaacaaactgaagtcggtattcaagaaaactccgaatgcaatgaagaccctcgaagcaactccagccctggtcaagcctcttcaggacccgaagttcagtaaaacatcgaccctgcggtggtgacgagtataaatgcgctggcgggtaacccgaacgtcaagactgcgctgttgaagagttccagcaccatcactgaggagaacgtcataaaggctggagtgctcgtgggaaagactgccgggaagaagtggaccgaacaagaccactacacacttctggtgagcggcactgtgtgtttgctcgttctcctactggatgctcctgttattttgatgggtactgtcttcaacaagtccgactaggtttttcaaacaagtatgacatgtgcgaatatatctgaagagggcacaacgtttctcactgcgagtgttacctgcaatattgtagtaaacatttatcgatgtcgcgttttgatgaagcggggtaatatttctttcggtcatcttgaagaaatcctaatggaaccgaatcgtgttcggtatgtagctacttagcttcatgcaatcgtctcgtgttgtttgacgatttgtatgaaaacatcgaaatccaggatacgttgaagattggtctgggttctgttagtgcatcgcatcctttcaggctctaaagtatttggacgaacagataaaaggcggtgaagtttatttgtaggagtacttacgcttttggggccaagactaggttcccaacaaaaaatagttaccgacaagttcttgaaagctgccaagacatttatggaatatttaagattccataaatattgaaaatctgcaagctggtcgggcatagaagtttccataagtgctacacgattcaaagaagcttgtccgacagctgtacccgtggcaccggtcatcggtatgcttttgaagcgagattgacgatgccacggtaaattagtggaaggacgtatgcaatggtggcgaactatggttattgcagcttttagctttaatttatttgctatttgtacgtcacttttgcctctcagccctcacggatagatatacttattctgaccagcatgtggtcaccagtacttagtagaaagcaaattgaattgtgttgcgttaccgtagttctacagtgctgctaaatgctgctttcttgcctacgagaattcgtagcggttaattattccggctactaacagttccattattgtgttagcatgagctttgtcggcttggatatgcaagcgacagcgacgacgagagcctgggatcgtccacgcagcagcgtccaccaacgggtcgcttccaagatagaaatgccttcatgcggctttactcggtggcaaaaaggcatagcaatctatccaacctacgaatcgtaggctacgatagggcactccaggagtcaaggcagagctgttgaagagctctagtaagatccctgaggaagccgttcaaaaggctggagcgcttgtggggaagactgctggaaagaagtggaccaaacgcgaccgccacacgctaatggtgggtggttgcctgttgctgctcttccttctaggaagcatccccattatttttgtggccaaaacgtagactttgccacgctgctgacgctggataagtactgagcaagggatcactcccagaacctaagagggcaaactacctaggtaggttaaagtactcttagcttgatcgttttttgttcataacgtggacaatgcagctgaagaattgatgatcgtatccttgttcttacttgaactggaagtgcacacactcaggattgatcgcaatcttcacactttgcttgctacgtttccgcaaaacgatacaggcgaccgcaatggtcaccaccgaagacaataatcgcagcattgctcgcacgaaaaaccacgcgataaacctgtttgttagcttaactttcaaaagacaaggacttggagtgtgcggatgatgcttgtctaccgcatcaacacaacttcagtttgaacgacaggcacgtcgtacagaaccccgaaaatgcaaagacagacacgattttttttgctgttcgcactgaacgcacaccaacgtcaagcactggcactagtcgtcggcacgtttcgacgacaagagcgatttgttctcctctcgctctacttgaacattttcttcatcttcttgcccatcttcttgaagcctttgcccttgaagcccttgtacttgtggcccttgaacttgtggcccttgtgcttgccgtgcttgtacttgccgtgcttcatcttgccgccggcgatcaccacgccaggctgcgccacgtacgcgggctgcgcatacgcgtacccaggctgcggcgcgtgggcgtggtggccgtgagccgggtaaccgggctgagcagggtacccatgttgctgcggcgggtatccttgctgcggggggtatccttgctggggagggtactgctggggagggtacccctgctgcggagggtagccctgctgcggggggtagccctgctggggagggtacccctgctgcggagggtagccctgctgcggggggtatccttgctgcggggggtagccctgctgaggagggtagcccggctgctgcgggtaaccgtgcgggggctgctggccgccaggatacatgttggttggatctggcttgggctggagagctggggcgactgaagcgacctgggggcggcgagatctcgagtgacgaagagctgctgacgtaccatcgaaaagcggggagagaactggaagttgtacctaccgggaatacggtgctgtgattggctgatgcccccaccgtacgtttgtcggcgcgggattggaccaaaatcagtgttggtttttaccaatccaatgccaaacagttttcgtgttgtcagggtttcggtaccttactgaacagatatttttttcgctattcacgttaccgcacaactgacgactcctactcaggccatattgtagtgtgcggtgttcaactcacgaagctcgacggcatggttggcaaaggctcagaactcggtcagtttggccgtcagattctccgccaaaagcacgttcttacgttcttggactccatgtcgcggtgaatcaccaccgaagacagcaagtgaaggttcatgggtgcaaatatgcggcgtggtagacgatgtggagtatgttgctatcgagcccgtaaggatagccttgctcgtcgtgagaggtcagccgtgaatttgatctgttcactttcaagcttcgtggctgtagaccaacctgcaaactcctccgtatccaccccgagacatgagatcctagatctccacttggtcgcgggggtggaaatgctacaactcttttcactgcagacttcctctctactagttccggccatcgtcatctcgggtgtagtgagtctgttgatgtaagaagaagaaaaaaactaaattaatttcaacgtttgagttgaaggcaaactcgaagaagtcgtaaaagttaaaacgctacctcgatgcttgtcgggcagcttgaggacagttccacttcatccagcacgggcagcttgcaccttcgtgcgcaagaagcccttcaaggtggggttgcttgtcagcttcaaagcctcagtcaacgtgctgagtggccagtcactgtcaccacccatgagttgcacagcggcgttgtggttgttaagagctgcacgaacaaacgattcctccttcacagcctgcgggatacctgcttttctgagcagacacttgaggatcttcgtcaggccgttctccgccgcgttcttgaacgcgtcgctgattgcacagggaggaaaaatctgtcggtcgaagccaaattcgagaaactcgatcatgtcgaatgaagtgtacgagaaaacttcgccaacgatctctggtgggacgcactccatactgtatagaaaccttgcaacactttcacgctctttcgtcggcatgttgatcctggattcaagactgaaggcgttcttgaacgccataatgatcgccatctcgggcacatgctcgttctcgaagatgaactcggcaacctcgtagctgcccgcagcttggaatgccatttcgatccccatttgtgtaggacgacgcatgttgtatagactcatcgtccctttgatcgatccagatcctgcaacactcaggaacaccgcgtcaaagcctgctgtcgacacacggccagttctcagcaagtacttgcagacatcgtcatgccggctcatagctgcgctcataaagccgcattcaatcaaatcgggctcgttatgcccatgcgttaccaagtgttcgactgctttgaggcgccccgctccagccaagcgggccagtaagctctgtccatccttggtgtctgaatagtctttataaatctcatcagcaactgcatcctgacctcgggcgatgacctcctcgaatacatcgccgatgtcgaaaacatcgcccatctcgcagccaagtaggaacgtaatcacgttggcatggccaccgacgattgcactgttcatgacctcgcacgacttgtgctcaaactcctcctcctcaacgtattccgcgacaaatttcacgatccctaaatgccccttcaccgcggcctcattgaaaacactccacgccgcgtcgtcatcgatttccccttcgacttgcagctcatgcagcagatactcgacgactgggaggtggccattagaggcagcgggcagtaccgctttccggaggaggcggcacagtttcggactggctaaatcgcgctccggctcctcgagttccgttcgcagcagcagccggaccgtattcaagtccccagtgatcgctgcaaacatgaaggcgtttttaataacccctttgaacttcgtcttcagatccgccagccgttgggagtctctcgattgcagggcctggatcacggcttgctctggggtcagcgcctcgctcttgatgtgggggatttgcgagcggaggcttggatttcgttgggagttgcgctgggatgcgttgtcgcctgcgccggtcgtacacaagcgcttggcgggaggtgcttgacttggactggccattttgtggaatgaccatcagcttgaagggtcgatcctggtaatgacgaattacggagatattgtttttattgaggtgcatgcgtgcgggcactagcacttgtttcgcttacttctcatgtcactgtggacttatgtagtcataatggagtaatgcaggtatttttcatgtgatgctctaagatcctgcgctgcttatattattattttttgctaacggcgaaaatacttaagcaaacaacagtccggaaactcaatcgaagggtcgttttagcatggagggctcgagtgcgcccagcaagaggacgcgtggaagttctgcgtcactacaagaaaaacaaacctagcgcgagtggtccgcttcaggggagatcaaggaaaaatgcatccacccattctacagattcaagaacgttgagttcccacccgctattatagctctgcgttgtgtccttcagaagatcgatctgttcctcatgactccagacgaagctgcttcggaggctgcagggagcggagacttggactggatggaggagttgctgctccactccgactatttccaagatatcgactcgatagctcaagttgccgctgcaaatggccatttcgaaatggtggagcttttggcctccaacttcttcgactatagaggcgagatcgacatcgttaatttttgacagattgctggaaatggcacaagtggccgcaaagaacgctcatatgagttcttgattcccgaagaagtcgatcctgaattgccccggttgcgccgaaaactgaaggtcgctctgtgtcaactactggaagaagctgcaggaaatggtcgcctcgaagtggtggaattcatggtggaaagaaacttcgagtgcctgcagtatccggaaagtgaagtagacgcacgatattgtgcgattacgagtggtcacggtcctgttgttaactttttgctccatcaggacgagtatgcgtgggatatggcgaaaccttgtgaagcagcgatcgctttggggcagagtgaactggtgcaaagaatttacgacaaagaccccacgcatctgtttcgagaggtggcacgaacgggtagtgcagatactgtagaatacctctataacgcaggttacaacgacgtcgcgttggtgaccgctgcatttgagtcggcagtgtcgtgggggaaggatcacacggttcgattcttggctacatctcgtcggatgtctttgatttggcctttctggaggccgctagtcactttggccacattaaagtgttggaaaccctcgtcgatgcgaagcgtgcatcggcctcggtgattagtcaagtttttcaaggtgcaagttgtacagccatcgcgctcaaagttttatgcgaaaagtgtgacgtctcggatgaattggtcgtggctgcgtttcgtaactcagcatcctctgacaatactgagatcgtgatgatcttccataagctccgatgaatttcctctgaaatgattcatgaggctttcgtggctccagtggagcacagccgtaaggatcttaccgagtttcttcgaggcgacactcgcttgacttccgacacactaaatggcgcgttcacacaagcggcagcccagggtaaatggaggatacttccatctatgtacaatgatgagcgcgtatctgccagtacgttgctcgtggcattccaaagtgctctacatgcggagtgtgtccatgttgctggaacaattgccaacggagtatcaacccggccggatgtaccacaagatactcgagacggcatgtttgtcagcgctgcgacgcatgatcagattgaattgctgcaaatactgacaaggggcgaatcaaaggactggcctctggacgtgttgaagaacgctttggaggtatcacaccaaagaagcgcatcatggaacggatttgtaagcagcttttcagtggaagacccgaagtgttaaatgcgactgacagctgcggccgcgacattgatcaactacagtggaaaccccgtaattagctgcattgagccggcgcgcgtggcaagttgtatgcggagctgttgcatttatagagctatttagttgccgcttgctatctgtttaaaaatacgtttttttttataattcatcgattgaaattgcctaccagccagagcgcactgcagtcagttatcggtaatcatcgaactatcttcgacactcagttatagattgtattttttcttgagttaagatcttttctagagcgctcacgctattatgccgacagagcccagatagtccttttcatccagtattggattgctccaccactcgaatagtaaagctgagacaaacaaatgttgttgacgaaagtcaaacgaaagtcaagtgaactcaacgtagtgttcaattttgagaccatgtctttgctgaggtttctcctaccacaaaaaggtcgattagctcaacataagcgtctgcagactcacctatcggtaaatacggctgttccagtaaaatgtttaacctactcggacttgttgaagaccgtacccatcaaaatgatagggtttgccacgaaaacgaagagcgcaagcaaaccgaggcataccaccagcgtcccttcgtcggtccactttccagcatcctttgccaccagcgctcccgcttttttcaccgactcttcggtaatcttgccagagctcttcaccagcgctgtctcaaggtttggggaactctcagcttattcaagctcttcaccacagcgggatcgcttgccacagttttgagggttttgctaatggtcgggtcattgatggtcttagcgaggcctggatccttctggagcgctttggcaacgtttggggttttcctgaatagtgacttcagattcaagagacctgtaataccccaccgttcttccgtgtcggtgtcggcacctttgagattgcgatgcgcgctatcgtcggcgatgaagcgctcgaaaccagtcccctcgcaggcaacttgggcaatggccaatacggctaggagcaggagcaggaaatatgcctggcgcattgttgagagaagcttcgcaggggcttgggtgtgtaatggtcgaatcggaaatgaatacctcgaacttaggacatcatgactgcaataacctgctaaccatcacatcaacagactggtccttacgatagaggtaaatttgttggtgtgatgctatctctatctgcattatgttacgttttaatttataaccgcaataccgcaatgccgcaaagcctgcttcaatcacacctgttgagctttgcgtcacgtcagcttgtatgtgcatgcagtaccaagcaggcatgaagggagcactcgttgatcctgcacgggttgctccttgtagtggtgcctcgcacctggtgtattgcagaatgagttaggttggatgatgctaggatgtctgtgctaggctaatatgcatcggtagtttcgtgttgtgtagctggaggggtcgttgtggtcgtcgcaggccgttatcgtcgccactgcactcatcgcaggtggcgccagctcttgcgatctccaacagccctcctcgaccaagatgatccgagtctacagcttctcgttgtgcgggtggataagcttgatcatggccaggttgggcccgtgtagggttgcgccgaggggcttcgtgaaaatgtcggccttcatctcagtcgtagggcaataggtcacgctgacctccttcttgcgaatggcgtcgcgtatgaagtgaaattttatgttgctgtgcttcatgcgtgcagtcgtcacgtcgttctccatgttttgatcgcgctctggttgtcgatgtacaattcgatagtatcatctttgctgtgcagctcaagttcattcaggagctgtttcacccacaagcagtcctgcactgccgtcgccccagcgatgtactcagcctcggctgtagagagggcgaccgtagattgtttcttgctgtaccacgaaatgggcatggcgttgatggtgagcagtcctcctgaagtcgactttgtgtccttgcccccggcccaatctgcatcgctgaagatggctgcctcaatagtgtgtcggggtgtctgcgggcgggaaaagcgcaacctcagctcgcgcgagccgcgcaagtagcgcaggatacgtttgactgcagtccgatgagtcgacgtaggcgttgagacgaaacgcgccaggaagttcacaggcatcgtgatgtctggtcgagtgtagttgctaatccatagtagtgacccaatggtctcccgcatgatgctagtgtcgtagaagggctcgctgtcctctccgttcagatcccgagttgactccatcggcgtagtcacggggcggctattctccatgccgcacttcgccagcaaaccgtcaatattggctgtctggtggaggtagatgccgcagtcgctctgctcaatgttaattcccaagctcttcttggctggacccatgtccttgatctgaaattggtcggcgagcttctgcatcgtccagtcggaatcgccctcacgctggctgacgaccaccacatcatcgacgtagaggcccagtacagttagcttaccttcatgccaacgaaaatacaagcacgggtcaagctggctcctcctgaagccaaattccagtaagtagcggtgtatagtgtcgttccacaacttgccgctctgtttaaggccgtagagactctttcgcagcagtaggcatttgcccttgggtaattggagtccgacagcggcgcgcatgtagatgggtcgatcgaggtctgctcgcaggtatgcgttaggagcatctccttgtcgaatgacggcatgccactgagatgcgagggccacaatgaaccgcaggctcgcgatcttgagcacgggcgcaaaggtctctgcgaagtcaatgtcaaacttttgagtgaagccgcgcgctaccagccgcgctttgaacagttccaattcgcctttgttgtcaaacttgagcttgaacacccattttgcacttatcagatttccatcagtaggaatgtccacaatttcccaggtagcgttcttcgatattggtcgaagctcttcttcgattgcctgccaacactcctgccaatacgggctgttcattgcctcctccacggttactggctccttgatcccgtcacgctctagtagtaccgcaaaggcagtaccctccttgagtacgatagtgagcaggacagatgccggagtggcgaactcttcgagaaaagattggggcagccgaaagtcatcgcgtggtagtgctcgtgtacctcgattcaggccaaagatgcgctggatggcacgcgacgtaagttgatgctgctctgcagggctaccagcccgtgcttcctcaccattagcgtcatgtggggtgttggtttcgtgctgttgatcgccagcttcctcctcctcgccgctattgtctgcgtcgacagcgtccatgtatcgccccacggctcgcgagtccagacggtcaatgttccggatgtgtgttgtagaaataacacgtttggttcgcgggatgagaacacggtacactttcttcttgaagtcgatgccaataacaactcctctttcagcgcgctttttcgctgatcgcttcgttgcatgagcgatctggctcgtacacttcgagccgaatttgaggatgtgcgagacactgggtcgttttccggagagggcctcaatgggagacgcatggtcggcgttcgctcgagtcggcagatagttgcgaatgtagctcgcatacagaacagcatcgccccaaaatcgctgtggcaatgccgaggcccagagcatcgctcgggcggaatccatgacagtccggtgaaaacgctctacttttccgtttgaggatgacatgcccgcctccgattcttggtggagaataccccggttgcggaggaagcggccgagtctggtgctgccaaattcaccaccaccgtccgagcgaatcatcttcaccttggtgtcgtattgtcgctcaaactcgctaacaaagtccttccaatgcccttccacgtcgctctttttgcggagcaagtagacgcgattgtagttcgtagcgtggtctacaatggtcaaaatgtgtttgtgaccgagccgatccggggtcatgtccgtcttcaggtcaacgcacaaggtagcgcccggttcgtccgttggggcagatgtagaagtatcctgcttgttcttcgcgtgtcgagcttgtttcgcttcagcgcagttcatgcagaaatccaccttccgattagaggcaaccatgccttcaacgaggtttttgtcaatcatgcgtaccagatcctggtagttcacgtgccccaggcgttcatgccactgctgaagcatagaggtcgtcattgctgcgaaggaggccgcgccttgctcgattccaacagatcaaagcccagtcgaggctgaattacccacttcggcaacaatcttgcccgtcttgttcgtaattgtacactgctcctcaccaaaggtacaggtgtagcctcgagcggtgagttgagccactgaaattaggttgcggtcaataccttttgcgaagtacacgttttctagcaggacagtacgaggcactccttctgccatcgtcgtgatgacagtctttcccttctcagtagcggcgacaagatctccattcgccactcgcaccgacaggaatgctggatctatcgcgaaaagttggtcacggtcgatgcaaaggtggtgagttgctcccgaatccactgtccaaacatttcctctcgtggcagaagcgccgcgctcggcatcgtcggcagcgacccagacatagccttcatcatcagaatctctggatgtgtcgtcatcatcagcagcggctacgttcgcacttcctctggtggctagttgttttgcctgttccacgagtggacacgtgaaaatcttgtgaccaggcttcccgcacacatggcaatgtattgcaccacgatgaccagcggcggtaaaggcttggccgttattttgctgctgcggacgtcgatccgagttgtcgttgttgtttcgctggttacgccaatgctgatcatcattgtggatatttcccccccccctgaattcgggttccggcggtcagcatgacggtttttgcgttcatctcgcttcgcaccacatctgcgcccgtcacctttcagcttgtatagcagtcgcttcatgcgatcggtttccgcaacgtagtcgcttgcgtcgtcgggcactgaagacaacagcgtgggcgctaactcggggcatgcattgtttccgaacacctccatgaccatcttggtctgatcaccttccatgaggctctcgatgaagttcaagtattccaggtagtcatgccacgtatcgccaccacgcttgttacactgcatcttcgtgctgagttcgagttggcttagtttacagccaaactctgcacgcatcgcgcgcttcacatctgagtacggcatgctgtcaccattatgacggcgctgccactctgagttcttctcgtgatagtacctagacgctttcccctcgaggaagttgacaatcaccgatgccttgatgtcgtccaggtggatccgttcacgagctcttccgtccttattgcatgctcgaactcgtggatgaaattctcgaagccagctcctaacccagggtaaacctcgtttcccttgaagttcgagcagcatacgtccttgattttaggcttcttcggtgatggaggtgcggtttccatgctagtatccgacatggagggggcacggggcgctcgcgtcgcgagctgcttcttcagttctgccagctcggactgcagtcgaaggatgagctggagctggtcgtgctgctccattgtctcttggtccgaagggtcgaagtgcaggtcgtctggcagtcctaggcgagtattccttccgtcttggtggtcttcgtcagcctcgttagcacctcgtgcctccgagtattcttcaagggcttcgtggtcgcatcgcgagtcttcgaagtcttcactggtcgcggtcgctgcggtaggcgagccagttcggctcataacctgaagggagcactcgttgatcctgcacgggttgctccttgtagtggtgcctcgcatctggtgtattgcagaatgagttaggttggatgatgctaggatgtctgtgctaggctaatatgcatcggtagtttcgtgttgtgtagctggaggggtcgttgtggtcgtcgcaggctgttatcgtcgccactgcactcatcgcaggtggcgccagctctcgcatgacagtactaggtacttataaaaatactgaagctaagcttattatatcaatcgaaagagatcaagtggggtctgctctaatggcggcagcgaaggggaatcacgtggagataatggcgctgctcgggacaaaggtggatttgagacgccgcgatggctgctcggcgttgcacttggccgtggccagtcagcgcccgaaagctgcaaaactgcagctcggcttcgatgcggacgcatctttcgctaacaatgacggagtgatgcccatgaagttagccgttgaaaatggcctctttaattaatcagactcttgttgagggtggcgccacagtcgatacgagctgtgtcccagaacggcgccaacgttctcgccattgcagctcaagctagtcaagttgaggtactgaagttgttcctagagtgcagagcccagtgaatttaaaacagtggcgcggatcgaactccgctcatgttcgcggcggcaaccggtcgggttggaggctctggagcttttgctggaacatggagctgagtccaacaagacggcaacacggctctgactatcgccgctgaatcggggcaggtggaagcggttggaaccttactaagccacagcgctcggggcaatacgagcgagttcccggaggtggcgccgttagctgcagcggcgcaacatgggcacgtggaagtgattcaggtgctgcccggtacatcaagctgatgtggacgtccatgataggggctgtgtatagagctgtgtacagtgggcagctggaggcagctcgcgcgttggtagaggctagtcttggcgccaacgtgaacaagcggaaccagagcgggtggacgcctctcatggccgcagcacatcggaactttgcgcagattatggagcttttgctggagaggggcgcctcgctcacgctgaagacgaaggatgggcggaccgctctgcatattgcagctcaggaaggccacacagaggcggttggtctcctgcgtcggtcgagtggcgttagtgggcactgttaatcggttgaagcggacaccgttgatgctggcggcgtaggaaactgttcagctgctgctggacaacgatgcgagcctggactatatggaccaaaatccactgcaggtcgctctctccaacagcaagattgacgtcgcaacgttgctggagatagacgtcgaattcagtatcacgtcaagggaagagtgaagaggcagcgtgcagcaaatgtaagagtccgtgaagggtatctcagttcgatgatagggataccctggaggtgcgcgtggtatctcactacgtagcgcccatgggttgaaaattatcaacccatgattcgatcggttcatgagattctctcacaatttaattttgtgagagaatccggacgcaagcaaacctgatcgaaagctagaaaatgagttgcgctgccgttacccgcagaactatcattctcgcctcccttcctgccaggatcacaagtctatctcatgtcatggaccgagtcgaggaactgctttggacgccgataccgagccagcgtcgtgcccaaacaggtccagtccagaagctccgagccttgcgatatagccacatccaagcaaaattggtccgtgatctcgacaatggggtcacttgagtcttaccgaagcgccgaaatcaaccagcgaggcaccaccttctttaccacaatgcagcatgatattggcgggtttcaaatccgcaaagcaatagttcttggagtgaatatggccaagtgcactgacgcagtcgcaagcaatagtggtcaaggcgcgaagtccaaccggagcatgtagcgtgagcaagtcagcagcactccgagcaaagaagggcatcacaataatgtgtcgctgctcgccttcagaactctcaatggagaaggacttcacaaactggacgatattcgcgtgtgtttccagcgcgcggttgacgtcaacctctctctgaaacgcctcgctgtgcatcgctccatacactttcgcagaccagatctggcgtaggcatagtaaaaagcagacttcccttgaccttggcgcaacttgagcgggccattcagctcaaaaccttcacgaattacgatgacgttccgcgtcgccgccttgatcgctgatcgggcgaatgcaatgagcacaagcgcttccctacgggtcaagtaggccgccctaagggaattatacatgccagtctccctttcgagtaagaacttcacttcctccggggtgaaacttacttgaagccgggtcaaatttttggaaacttccaggtcacgagaagctcgagttgactccgacaccgtcactggagcctccaccagcaggtgaattgggcccaggccaacaactttgtctgcttcactcgcttcgccgagttggccacttgccagccccacgcatcgtaagtgcgcgtccgtagacgagacgcgagtatagtcactagtgtctctcactcctcccagcgcttcacgttgtgtcagccatttctccccgtcctcctccttctttctcttcgctaggaagagttgcaggtcttcggcatcgcacgtgatcgtcactggtttctctgtcttgatcgcctccttcaagtcttgaaccctgtccagctcgtccacctgcaccaagaacgggctcccagtctctccaacgaccgcacaccagagcttcaacatcatttcaatcttacggtataatactcgatagaagaaggcttttcgtcttcttcggcttttttttaaaaaaaaagacgatctggacgttttcaccaaacacgactactttcacttgaaatatgtatgcgtcgccgctcttaatactggccccttggccgttctcgtagagtgcctaccccttgatcttccttcatttagcccctgtgacaatgtttattctgtaggatacagaatacggggttagaggggttaaccccttcgaagttcgaaagagaggacaagtttgctggatatatattatgtcctgtgacaatgcttattctgtaggatacagaatacggggttagaggggttaagcgggaacgatacccaaaccaaatggctacagtcccatttcgggcgatgccaatggcgtccaagcgtgtccacgactccgtcggtggcaccgaagctcctcctccgcgctccaaacgtgcacgcccgtctccagaccaggaggagtgcaagaccgatagccaggagcaaccgtccgaggtcgatgcgtcttccccgcagttcccgaggctgcagcacgtgtcgttccccgtagcgatcgcggcgcttcctcacgtgctgcggctcattgacacgatggtggtggccccagaggaggctctggttgaggcgacgtccacccaccaagtggagtgggtggagcaattgttgcagaggttcgacgactgctccctggagggagccatgatccaggcagcgacaaatggctacacggatgttatcgagctgccactggagcatattgatgggtacaattcggaagacgacgaggtggagttcgatgacaatacgaaggagttcgtgcggaaggcggccgaagtcgcggccgagcacggccactgtgaggctgtgcaggtgctgatatcgctcgttatggactttgattggagccgctactcgtcggccttctaccatacagctcgaggtgttctggacgcggcggctggacgtggccatcttaatgtggtaagattcatggtgcagcacgcccatcagtatcgctacaaccagcgcttttccatttgggcttctgtcgacacgttggagcatgcgcttgctggtggacacctcggtgtggcaaatttcctcatcgactacagcgacatcttttggaatctcaagcgagctttcgttgttgcgatggaaaggggactcacgacggtcgcggacagaattgctggcgtctttccagcttgatttcacggcgacaatctgttctcggagctggcggaatctggtgagctggaggcggtgaactttctctacgacaatgggtccaacgacgcacggtcggtcgagaaagctttagccagcgcagcgaatggcggaagtgcagaagttgtggagttcttacttgatacgggtctggtctcctcggatgcgttcgatgaagccttcaagcgcgcgtgttgcggctacaagaccaccgacgtggtcaagtacctatacagcctgaagcgtacaaccccacaaggaatcaaccgagcttttggtactgcgtacgatgtcgaggtcctaaagtatctcgacgaaaacgagaatatcacggatgaatccattacggctgcctttaagaaatggacaaaccgtggtttcgctcgcaaattcgacattttgaagatcctcgtcagcaggccttgtgtcccctctgagctcatcgataaggctctcgttgcggcagcaaaagacgataaagcgggaatcttggatctgttgcgtcgtgactcgcgtgtgtccgatagagcgatcggagaagcgttcgtgcaagcggttttatcaaacaaaccgagtgtcctggagtcgatgtatgaagagcagtgcgtccctcccgaggcacttcttaaagcgttcgcggaggctgcacaccgtaaacggatcggcatcgtgaaggcgatcgtaaagatgctgtccgtacaaaagcgtgtgccccgagaattcaggtgcaaagctctgatcgcagccgctcaccatggccacatggagatattcaaggttgttactgaagccgaggcagaagattggcctctagaggcattgaaggaagctatcgatgtcgccgaaggaaacctgaaaatcgtcaacctgcttcggaagttggtatgtaatcaggtgttcaaggaggggatcagagttagcctgggctgtgatgcctttcgcacgaagtgctcagatatttccaagcccctaatcgtttttcagcaacaattcaaccattatatttacacatccgtagcggttttaaagcagtataacagtaccagcatgtcacttcagtgtggctcattctcctcactgaactggttatagtgcaaagtcattatggcgctaactctactgtattcagctcgattgcttcactggcgaaactagaatcgacaacttcagcgtggccatttctggcagctgccatcaacgccgtcaccgcgacgttttcgtggtatgaagtatagttcgtactccaaaccagagcccggtccacgcgaatagacccccgtgtcgctgcaagttccgttggcacggacacatccgcgcaatgagagttctccaaaaggtttttaacgccatggtcatctctttcgagagcctcgacgaggccttcaggaaattcttgcaccagtctccacatctccgtaccgctgccgccttaatgattgcctccgtcgacacttccgagctctactcgagacaagagcttatcacacaattgaattgtgggtattacgcactggacaggcgcgttggaaaactcattgccagctgcctcttggaaccgagtcgaagccgcattgaagcagccatggcaccattgctcagctccgtggttcccacgtcgtatcagtacactgaagttcctatccatagtcaagcatgttcagtaccgtcgcagccattggcctatcgagcgaagcgcacgtcgatcaggcggtgggccagctgcccgggctgctctgtgtcctaagtatctaccgacccggtgttgacgtcagtaaatcctcgtgttgccccgccaagtcgtcgtgttcttgagcgcatattctacttccggagctgtctcggatggggccgcaatcttcctgctaatggtttcgatagcatgcgcaaccactctaagtggccaagtgtcgagaaaaaaatcgtcccagtttttttttataagtgagtgcttaagtatcgatgctatcaaactcgcaaattagatattcatctggccgtcttctcctctctctctctctctctctctctctctctctctctatttgattaatcactgctgttgttgtttgcaagcaggaaatctaggacttctgagtgctccatcacgcgggtatgctctaataggtcgcttattgcccgtggagatgcgcgctgcttgtcgtacaaacacttggctatacgttcatgtcctgcgctcgcaccggcgagaaatgctgttgtgatggcatcacgagaagctcaaccgtgattgctaaaccactccacaacagttaaatcatccatcctagcagcattaatgaattcgctgatgcaattgcaattatcacgggaaatccacgcttgcccccccaggtagttggcaacgcgaacgttcttctgccgaactgccgccactagcatctcggcagccagccaagagggaacgtgaccattttcccacaagaactttaaaaccttccgttgggtgttggtgcacgcacgtctaaataccgtcgccttcaactcaccggaaaagtatcggcttctgcacaataccgccataacaccgatgcagctagcagttcccgcatccacaaacacccgatcgatcgagcctctcggtatttcacagctgccgccaacgaggaacttgacaaacacaagttgctctggacctccatattcaatatagaatcgcaccgctctctcgaacacttccttgaatcgcgacaggtttccaaaaatccgagttgctacgtcgaaacacctagcgcgaacaacattacggaaagctgctgccactgcctccggtgcaatgttcccccaatccagcaatacggacgaaacacgacagtgagagcgctccacagaaatccttagagcatgagccatgacatcagagcgaataaacggccgcttgttgtttgctgcacaaaccgattgcatcgcgtccgtatcgtcattatttatcaggagctcaagtaagctctgacttccgaaaggagggaacaatgcatagatcgcttctgcagtgtggtgctggtcgttatccgatgcattgattaatgcctgacggtaccagcgttggagttctggacagcgctccataatcactcgaattttactcagcacgatcctggtttcgtgtgccaatgctcccggtacgaaatacaagctcgagtaccactcgactgtttcctcagcggcgaactccagaatatcaacgcgcctttttgctgcggccgatgataggaggtgtggaaggcatttctcctcaactcgattccactgacaccagctgtatagctgtttggtagtatccaaatcgtcactttctcctactgcttccagtagccgttgttcagggatacagggtcctatcagtgcttttgtcttttccccttcatgtgtagcaaccgtcgctaatttcacaatattgcagtcgaagtgttttaccagcctctgaagacgaaatgattttccatttcttgctgctaccaacgcgacttcatagagctccatcgcaaacgtgtcgagcatctccaccacgtgtgacaacgcaacgattcgcgacggcaagaatgcctcgatgctctgcttgcgtgtaaagcttgctacggtctccatgtcaaattctttgacaaagcttgcaccactggacgccatggccgacgttctttgtttcccccaattctgcgactgaagatttaagaatttggtcagaacgaggtcgaaacctttctatcacatgagattcgagatactacgatccgataaacgtatctccatcattcacagaactcatccgaagctttgctgttggtaggtatgacgtatcttaacgatgaatcgactggtgatgaatgcctctacgccgatcgccgataccgtctcttcatacacctgtaagcaaagtctgcaggcattcctgccttcacgagttgcagcattgtcacatgtagtggagagaattggctccctagccatgaccactgccgatcggctggtagaggcagcaagacaaaggaacttgaaactccttaaggagctcgcgtgggacctccgcttcgacgtgttaactgtggttgctgctgccacaaaggagacacccaagacgttagacgcgataggatcctgttttcgagactggactttcgtgggtgcactgcataacgcaaaacagctcgacacgatcaaacttctttacaggtggataaaaggaagggagaagatgaacgccttaccgtcgatgctacagatagctgctacccaaggaagttttgacattttggagtttgcgtccgagcgtatcgttgtcgagtttttgggtaaagatcccgacaagtggctaacgcgcagagaacgacggcgtaagttgagcaaaattgtgcgggtcctgcagacattccagtcggtccagcggtggttccaccgagcattttacagcgcgtttcgaaaggggcacagagatttcgcagacaggatttacgccacttatcctagttatccagcttgcatcaaggataaattgttccaaactgccatgagggttggctgggttgaaattgtgaaattcatcttctgcaaaggacgcattaacgctgaagcaagtaatcgagcttttaaaggcccagcagattgtcgacgctgtgatattttggcgtttctcctggagaatgcagatatttcagtggagtccgtagagggggcattcacgagagctattcgttccagatcgatcgacgtggccactctactccgctcaaccaagcgagtcttcccaacgctgctaaacgaattattcgaggatgctgtatatctggatatcgttcaggttttatacgacggggaactcatttcgaccgacgtgatggagtctacctttcagaaagtagcgggtgcctgtatggcagacgcatgtggagatcgtgctgaggtgacccagttcatctcagacagcgggcggattccgcgggagacggtcgagaaggcctttgtgaaggctgccaatgcgaatagttctatccttgtagatgcgctgtgcaggaaccaagttatgcgtggtgatgttattgcgatggtgttcaaggatgcctgcgctagcggcaaattgaaaattgtgaaagtgttgtgcaaaaatggtcgcatttccccggagctggccgccaagatgttagggacagcgattcgacgtggtcgtctcaatatcgcgaactttctttgggggcaggagtggattccttacaagtatttcagccaagtgttcatcgatgctgccaagacgggtgacatacaagttgtggattggtttagtagccacaaccgagcttcacgtgagtccatggcggtggtattttagactgtgcaagttggtgaagcgtgtgtgtgtatacccagctcttgcgaccgccagtgctacttcatctggttctaccgcttgtgtgtcgatcatctccactacaatgcgacaacgcgaaaactcgagaagcaaggattacttcgagccattgtcagcggggaccgtctccagtatacagagcaagaaagaggaggtcgaaagcattcaatcagacaagaatttctacaaagaatgatggtttggttctcaaacaaaattgtgaaagtgttgtgcaaaaatggtcgcatttccccggagctggccgccaagatgttagggacagcgattcgacgtggtcgtctcaatatcgcgaactttctttgggggcaggagtggattccttacaagtatttcagccaagtgttcatcgatgctgccaagacgggtgacatacaagttgtggattggtttagtagccacaaccgagcttcacgtgagtccatggcggtggtattttagactgtgcaagttggtgaagcgtgtgtgtgtatacccagctcttgcgaccgccagtgctacttcatctggttctaccgcttgtgtgtcgatcatctccactacaatgcgacaacgcgaaaactcgagaagcaaggattacttcgagccattgtcagcggggaccgtctccagtatacagagcaagaaagaggaggtcgaaagcattcaatcagacaagaatttctacaaagaatgatggtttggttctcaaacatgttttcgtttaaaaacaaaaaaaagtgcaaaccgaacgacgttcagatcttttttttaataagatgtgtcgtagtcacttagttgctaacgaccgctaatctcacatcctacctacgcccgttttcatcgctggcaggtctttagcggaccaacccggaagagttttatccgcaattgtctgcacaatcatccagccattggcgtaaattacggtcagcgtatcgtatcactaccgtgtggaagtgatcacccgtagtttccgaagaaaatatcacttgcctgctgcgagcggtgtccatagccaagttgctagcgtccgctgtcgtgttaaatgccctgagttgatgtgcccacttgagtaccttacacttgtcagccagcactctgcatcgcataaagttgacgcaaatggtacgcaaatgacgttcaggtctgccaagaatcttccccagcgctctgtcaacgcaatgtcagcacgacctgaaccggtgctatgtgcgatcctgctacgatgaatacttcgaaaagatcctagctgctctagcaaggggccacgacatcatcacggttactgggtctccatactcaatctcctagtcaatgttcgacgcactatcgctctgcttcatgctggatgcgctcgacaaaagcaggaaccgggacgtcaatgttcttcgcctacttttgctctcgatacagcgaaagcatcgtcgccgctgcgttcacaaacacgtctgagttgcagcgagtagccgtgtttgagcaaggccgtatcactaatacgataaaacggaacaggtacggattcctggaagacgttcaagcccaagccattgcccgacgtgcggattacatctattcgtacgatggatcgccgagtttcgctccgacggccccagcacgggtcgtctgctttactagcccgagtgcagactggtttcgccagatgctggatgaagagaccgcgttgacgctgtacatgccgctgtggggcatggaggagctagtgacagcagccaattgccttcaactgggcttgctgggtcctcccgtgactcgagccacagtggaagaacggcgctacttctttggaggtgttgctcgtgattgcctccgtacaatcgaagtggaattgccaatgcttcgcgttcgtcgagagattcacggtgtaaacattttggatctggggcgactgaggaatggaatatgggctccgatgcattatcgcatttagcacgtccagccagtacctggtaatgcatttaaacgcacggagcgcagtttatcctgatagtcaaggcaatcagctaggactccaaaattcggagtccgaatcacaaaaaggctacgatgcagcaattcaaaattccttactaaaacatcgtagtgttttacttctctgcaatagatgttcgaacaaccaccgctgctcaatacgctcgtacctccgctttgcgaaaacatttatctttctgctgtacttttactcgagaaacaaatactaaatctaacgtaatgacacactacagtagctcgctcgccactcctctacgccggttcattcctgattccaccgacccaagcgcacaagacgtcgggatgccctcgatccccctctccaagtacgaccgctaccagcgcgccgtcagcttcttcctggactggctcattcgcgcccatgggcacggccaccccagcgccgatcgcatcaacctcgagttgctgaacgttacggcccaggagatcgccacggacccgtcctcgctcagccagaagctgctgcaggagttgcccaaggcgctgtcggcttgcaagtgcgccctgaaactcgactcacgcgccagttctctgacaacccgcactcgatttccagcgctactgagcacctggcaccgttcgctggagaacagcgtaaaatcgagtaaatcggctggaaaagagtattctgctggcgagaagggcttcgttttggacgttaaaacgccaaaaagcgtcaaaacggcgctgaaacgggtatgccaggaggcgtttgaggccgattttgggctggacggggtgttgtatgtctcggagcaggaggagctggtcaccggcgtgtaccagatttatgtcggggtcaaggcggagatttactccatgatcgaggccaccgtcgtggccaagctggcgatggacacagccagcgacctgaccacgcgggacgccccgagattcgagccatgcaagacttgattgaggcgatcggtgtccacgcccccagactgtacgcgcagactgtcaagagtgtggatgccatccaacaaaccttcgacagggaggggacgtacacgttctcgccgttcgagttgatccgggactttgaggtcatctgggccacgctgacgtgctttagtaccggtttgccgtccaatatgcggacggggtttatcttcactccgagcgacagagagcgatacggagaagagcgcacgcccagctacgtgctcccgcacactgacatgtccaggttcgtgctggtgaacctgtcgctgctgtacaacaccaactgcgagaagaaggaggtcacgggctctggatacgaccggtcgagactggagggcgggttcatgggcctgatgaacgactacttcgcgtcgcaccaggtgacgattccgctggtgtttgcttggacttgctgggtgaaggaggtggccgcgctgcaaggtgacggaggactctgtcgcaacattagcgtgacgctgaagcacgcgagggatctgacgcagcacatccattcggtcgtgagcagacccacgatcctggacgtccgccgcccagacccttccagcagtgggtcgctaccgaacctatcgttcctactacagcgctcgaacccgttcaaggctgggttcatcgtgctggacatgcacctcgcgtgtatccgggtcgggcacgagtgtctgcccaacgtacccatttttcgggcctttgggcatctgtacaatgctcgtgtgggtcaagggtttctcgagcccattccgttccttgaagacgtcttgaagctgtacgagaagttgattttcacgccgtcgagagctgcggcagtgcgtggcgcgtacgaccgcaagtatctctacgattcaggatatttcttcaggtcgaggaagaatatggtttctcctgggaaccagtggattgacgaggagaagccgggaggactgcgcgaggtatcgaagatttggcgatttcttagccaaaacgacagctccgatttcagaagcacgagtctgacgaaaatgctgtacactgctgcggaaacttgctcgtccgagttgtatgagacgcgagtgcttactcgagatgtgatgccgattctgtacgatattgctgatgccttctcagaactctgtgacgagttgggccagcagcaggtctacaagaagtccatgaataatggtgtccatggaggttctgtcaaggaacgcgctattgaggcgctggagaacgcactcatgtatcctctgctgccgctactgggtgctttacagtctgacgggtcacttgactttggcgtccttcctccagcaatttcgtcgcaatcggagagctctttcagtgctgagcaagtccatgacatggccaagaaagctgcagcagtcattaacgccaaattcgccgtcccgtcctctgaagttgagcgcaggtactttacgtttccatcggagccggactttgttacgaaggagtacggcacagcatcgtttaaagccaagacggaacgtgaaaatcgcgatcaaatattctcggatctgatgcggctgcttggagatagtagggggcctctttccaaagacaacctctcctatttgacagaagaaatcaagaaagatccgcagcttctgagcttgatgacaccgcgcacgaggacaaaccgagatgatctgtgtacgttgctgcatcaagccgcagctggacccgctcacgatgccgttctggtcgagtggatgatcaatcttggcgaacttttcaaccagtcgacgacgcactgtcgcaaggagccgctgaaaaaggacttagcgtgccctcgggaatgtcttcccaacgctatggctgtgcacagcgccgcgatccagggctacgatgacactatgatgatccttctcgcggtggacaaactcattgatctggatacgcccacattccacacgaaggaaacgatcgcgcacctagcagtaaagcacgggcactgggcattgtatcaccaactgtgtttcgtcggagctgacatctcgctgaaggacggtaggggaggcacgtttgggagttgaccacggaccgagaatggtcacgggcggttgcggcggaaatgtgcgtgaggaaaccacttcgattgaatggttcacgcgtggaggcgagttggaagacgaatcggaagggccgagaaggcaaggcggcaacatccctgtacttccagcatgacaagcaaaccagtcttgcggacgggggcagccacgcgagtgcattgaaaaagaagtcgaagaaaaacaggaagaaaggcaagagtgggaaagcgagtcctacgagtcctgctggctctacccccgatcctccagcagaagaaaatccaagcgtactgaagtttctgtcgggagccgcgtcgtctacacaaggaagcggcgaagcggtcgaggtatctattgggaaggcgtttgctcgtttgcgagacccaaccattgctgctacggacaagcatgcggacgcccagtacgcctgcaacgtgatcgatatgctgtcggagataacagccgagctttccgccccaaacatggttgccgacactagttccaacttgaggaagaccgtggcttccactgcctccgaagtgattcacatgatgcagaagttccaccaggttgaccacgcagcgctcaagcatccggtccttgagcctatccgagagcgcactagtatgacgcgtgaattcacaagaatggtgatgaacacggcccagctctgcgtctcgatcgacaggaagcagcaggcttgtgaggtgctgaatgtgctggagaaacgcttcttgaaatcagcttcagcgaaggatcgtccgatggacattgccgagctagttcgaatgtacgtggcgggtcgtgaatcaatgggcttgggtaagactgcaagcgcagattcgctgcgaatgctggagtcatttttgaacgaagggaaactcaagtcggagccggaacaagcgccttaaatggcaggcaaaagcctccgggttggctgtggccgaatctgaatcatccgtatcacgaaacggtaaaaaatcttcagcttaccaaaatttacgttgcatacttcgcgcagctcgactcgaattcgattgagaaaaattgatttaccaaaggtggatgagatttttttaaatccaatgttatcgcgcgagtctactggaacttccgtattcattttatctagaagtgagctgtcctgcaccatccaatgctgtagttagctagttttgaccttccgcgatactagcgagaagaatgcgatcgatagtttgctgcctggaggtaattacgaactacggtcgctcctgctgagatttcaaggcggggactacttttacgtgcgtgagggctgcatggagtactgtaaaatcaatgaagctgagttaggtaataacggcgggggagggttaagaactgatctagattcattgcaggcatcggtatctccacgttctacgcgttatgcttagcaaaatcccgactagatccatattgcgcagtcgttcttcgacaagcagctataactctccgtccacacaaagccttgcaatcggttctgaagcaggaagtccagaaccttgaagtgctgtaatttgcaggcacgcttcatcaggtcggtcatcacttctggagaagcccgctgcttgtcatacaagcactctgtcaccccaagatggcctgcgtccaccctagctataaaagccgtagttatcacatcacgagaagcgcggccgtgtctacagaaccactccacaacttttacctcgcccattctggcagaatcgatgaagcggttgatgcaattaacgcgggaacacagtagtgtctgcctccttggacagccagctcggatgaaaagcgctccactgctttctcgacggcaaattccaacatttcaaccctcccattcgttgccgcacgcgatagcaaatgcggaacgaatctagtcggtgtctgctttcgttcggaccatgtgtaaagaaccttggcagcttcgagatcatcactttctgcaaccgcgagaaaaagtcgctgctgggagatataggaaccgatcgttcttaacgtctcagcctcttcgtctttcgcggcaccagccagattcaagatatcgcactgcatgtccgagatgagtgcgccagcacgctcccagttcttgcgccttgccgcctgcaaagctgcttcgtccagcctcatcgcaaatgcgtcgatcatgtccactacatggggcagagcagcaactcgagacgggaggaacgccttgaggctttgttggcgggtaagtgtctccatgaacgcctgtagcgctgacaatttctttttctagactacaagatggggggaggggtgaatggtattcatgcatttccatccatctatccaactgtttctggtaattttctgaatgcgaaagtattatccgcgtaaatggcgcgttaatccgccagtagattgttgcagtaagcctcggcgaagctgttggccttgttcgagcaaagcgactgcaggttttcggagctcttcatacgtgatgccgctgcattcagcgccaagatggccccagtaactgttgccgcttcatcatccccgctgtctgtcagtctgcgtgatgaagtttcaggcaggccccacagcagcttcgcgtgagccgagtacagatccagcacctgggtaagcagcgtgatgcccatgacggacgtgtggtccatgttgctgagctgcgccatgatattccacgtgccgatttgggacgagccgctgtacttgagcgtcttgcccgtcgagtcgtaggccatggaaatggtgttgaccagtccgtcgttcggctgccagtccgtggagaagccgttgtttgagccgtagcgactgcccaagaagactgagaagacgtccagcgggaggaacatggtgaggatattgggcagcgagatcttcctcaacagccagtcaaccgttgagtgcgtgtccatcgtggcgtagctgaagtagtagacgtcctccagggtggtgacccacgcgttctcctccgctgctccactagtggacacaaatgtccttcaagtccgagtcgaagatgttgctggagagcacccgcttgaagtacgcggacagggtctcgtcgtcttgcttgggggtgatcccccactggtccatcttggcatcgtagaacagggtagaatcgtccccggcgatccccacagcggtgaataaccccccagcaagtcgatagcagtatctccgaacgtggagatgccgttagcgagtagcgttccctggttcggagtcgagatggtcgtgatggagtgcacccaactgcgtccgccttcgaagagcgggtgggaggacggatcttcctccacgggggttccagcagtgcccttctccagcatttgggtgagcattctactggtctgcccacccatactgtgtcctatgaggtggactttattgacagacccgtccgagttgacctcccaccattgagggtagaggcccgtcaagttgcgaccgtatcggaggtgtccgtgcttggctgagtggttctccccgtagtcgacttgcccccccccccttgatctgcgcgtagagctcgcaggcgcggtcccagttgctggagaatgggccgacgacggccgtgtagacggtgaagccttgagcctcgagctcctcctggaaatccccttgtagtccgccccagtacttaaagccgagcagctcgtcgcggccccaaccggtgaagccatgaaccagcacgatcgggtacgtgttagcagcgaggacttgagctggaatgacgcttgttgcgagcatcagtagggaagcgatcgggagcagccatcgcgacggcattgcgcttgatgcggccaccgcggaatgcaaagtgaggtccgagcaactgccatctcctccatcttctccgggttactgggccacgagggcgcgtgaagacgccgacactgctcgacgcagcaagagagagcagatcgtcgccaccaatgaacgccgtggagacggcagtccctcaggatgacgcgagacgcagcgaccaagagagcggtcttcatcagagctgggaggatggccttgaatggaggtcgacgcagatctatgacatggcaccaaccgcgagcaaaagccgactgagcaggcgaacgcgtttgtcggcatttcttcacgttcgcagcggcactcaactccacgtgaggtgattcattgcccttgccttcaacttgaagcacccacccaaatggagagctcgtcggagtagacgagggggatctgcacgttgcacgcaggtgactgccgagtccacaatccgcttctcggacgtcacggcgcgattcggacgtgtcagttgatcttccttcagtcctgtagactgcaggtgaccgacctcccccctgtgtcactgcagacatcaacgcccgtgctactcccgcgacgagagttgcactcgttcccctggttttcctgcgtgattggcatcagatggctccacatccacttcaacaaggcgaacgcgcggggcattggtggagcgcagctgggggctccgggttgccgccgtgtcagagcagtggcagcgcgttggatcgaagtgctccatgcgctcgaagtgcaaccaccgagcgacgacgcccctgttcatgtgtgctgcgggccttctcgctgtccgaggcgggcgcgcagcggagacccttttaatcactaactcactctcgaattcgcctcggtgtccacacccagtcaagactcgatccacgctcatggcggcgctcgtccgcctcgctctgctgctggccttggtgctctcgtccgcgccgacgctcgcagccaactcgtacccgatcatcctggtcaacggcttctcgggctggggccgcgacgaacttctcggtttccggtactggggcggcatccagggcgacttccagaacgagctcacggcccagggctacacggtctacacggctgcggtggggccgttctccagcaactgggaccgcgcgtgcgagctctacgccatcatcaagggagggcaagtggactacggccagaagcactcggccacgcacaaccacctgcgctacggccgcaactacacgggcctctaccccaagtggggcaccgccaactcggacggctccatcaacaaagtgcacctcgtgggccacagtatgggcggccagaccatccgaatgctggctcagttgctggagcacggtactacgggcgccccgatcgaggaggacccggcgtcccacccgctcttcaagggcggcaagagctgggtgcactccatcacgaccatctcgacccccaaccagggcacgacgctgggcgacggcttctccaccatcggggactcggtcaaggacctgctggccggcgtcttgagcgtcgtgggcatcctcggggacagcgccaagatggtgtacgacgccaagctggaccagtgggggatcaccaccaaacagtccggcgagaccgtgcagaagtacatcgaccgcgtgttctcaagcagcatcttcaagcctggattcaaggacgtgtgtctctggagcttgtccactgcgggcgccaaggaggaggcctcgtgggtcaagacgctgagcgacgtctactactacagctacgccacgattgacacgtacgacacgagggacttactgctgcggaagatctcgctgcccaacctgctcacgatgctgcttcctctggacccccttgccgtgtttcttggagggaggtacgccccagacacgatgaagctgtcgacggactggcagcccaatgacggcgttgtgaacacggtctcgatgggctctgatggagtgggggcggctgttaccttcgctggttcgtcgcagatcggcaagtggaacaagatgccgcagctcaaccgactggaccacctcgcggtgattggcatcacgctgcacacgcaggtgctggatctgtacgagggccacgcagcgctgttggcggcgctgccgacgagctcgagctcccgtcgactggcggactcgaccgctgccgtggcgaagctggatacggccattgtggagctgacggcggccacgacgagcgtggagaccaagagcgacctggagtcgctgtgccagagccccaagaacgcctacgccgagagctactgctctaagatgctcgagtccgcttcgacgcggcgtttgaggggctagaggagattgggtgaattgctgtaaatggacgtaagagttgatgttgtgaatccttgcgttgaagttgtcgtggacacagtatgacacactcgtgacagcagattcggcgctcgaagcgcacgtcggacttgccaaggaaggaggtcgagagttgctctgcttggaaagaagaagcgagaaagtctgagccaaaacgatccgttcctgacacgtgcgtggcaagttgaagtggcagtatcatagtcagaccagatatccggcgctggtgtagtaccgtatcatgacctccatcctgtatcatgaggttatcttgtcggaaatctcatcaagaggtgctaacgaaaccaagaagtcgtgagtacgctgcgcgaacttgggtttccaaagtgtcttcattcatttcttcctggatgcactaacggtgttcgcgtttgacaacgcaaaacctgctgacgacacgccgaagccccaccgacgttgcttcggtcgacacgtttctcttccgcttgccaacaaccgtaggatggtgatcatcgtccaagcactggttgccatccaacacccagaaaagcacggcagacaacgctcaatcgcctgcagaagccgaccgcaagccgtcatcgctacggctaggaccccactacttcccccaacgtggccctaccaattgaaagttggagatgcccctgtgtgttttcaccgacggtcatcaagagaaggccgacgccattgatatccgagtcaaagggcttcctggatactgtttccagtcatgcacaccaagatccaagatgctgagcgggacggcagcccgctcggccgtgttttgttcgtccgcgcttgctgcaggaacaggtgcctcgatttgcttgaaaatcatcggtcacttgcactgtcacctcaaccaaaagctcgagtctcgagctccatgacttcccaacctttccttgcggccgaagaaaaaagccacgcagccccctctctccgtcatggccccttgagccgtgacgccgcccatctccgtctgcaacttgcaagcaaagccccaccgagagcctttggcatcggaatccccaacgtccacagctgggggctcggccaggaagctcacacgccatcgagcccattcattcccaattccacctcggactgcgcattgctccatcctcctcccaagtcgatgcagacgctgttcagtgtcgctctactactgctcagtgcggcggtcgccacggccaccaacacgtacccggtggtgctggtgcacggctttgccggttggggccgtgacgagctgctcggcttcaagtactggggaggcatccagggcgacctgcaggcggagctcgaggctcagggctacaccgtctacacggcgtccatcggcccgttctccagcaactgggaccgcgcctgcgagctctacgcgcagatcaaaggcggggtcacggactacggcgcggcccactcggccaaccacgaccactctcgctacggcaagaactacacgggactctacccggagtggggcgaggagaacgccgatgggtccatcaagaagatccacctcgtgggccacagtatgggcggccagaccatccgcatgatggctcagatgctcgagaagggcacgacggggcccccgtagaggagactacctacagctccccactgtttgagggtaggcacgagtggatccaccatctcgacccccaaccagggcacgacgctggccgacggattctcggagattggtgacacgatcaaggacctgttagtgtcggtgatcaacgtggtcgggatcttcggcgactcggtcgacttgatctacgacgcgcagctggaccagtggggcatcacggccaagcaggacgacgagactctgcaggaatacctcgaccgggtcttctccagtagcatcttcgactccgggttcaaagatgtatccatctggagtctatccgtggccggtgccaaggaggagagcacatgggtcgagacgctgagcgacatctactactacagctaccaaggacacgtactcgacatacaacttgaagctgcagaagatctcgtaccccaacatcctcacgatgctgctgccgctcgacgtgctgtcgatcttccttggcagccgctacgccccggacacgatggggctgtccacggactggcagcccaacgacggcgcggtcaacaccatctccatgagccaggactacgtcggcgacctcgtcgagttcgacggctcgtccgagatcggcaagtggaacgagatgacgcagctcacgggattggaccacgggcgtcacgctgctctaccaggtcctcgtcatctacgaggcccacatggagctgctctacagtctgccggtgggctcgggctcctctcgccgcctcgtaacgggcaactcgacggtcaccgccaagctgaacagcgccatctcgacactgaacactgcgacggccaacatccagacccaggagacctcgaggcgttgtgcgagagccccatcaacacctacgccgagaactactgcgccaccatgctcaactccacgctggtgaacgacaccatcgccactgccaacgccaccgtggaggcagccacaaacacatcgatcaacacggatgtgagctcgacgcgtaggctgcgagggtaaactatactacagtacagaacgaagtgcaaaaaatatcagcagattggttgtcaaaagctgaaatcttgaaaaaaaattactttatattcagtctttttgatgagggccgagtcggcgcctgatccgagctgagcacccagccttcaaccgctttgggccgctcggagatttattctctatgacagcctctttgctattacgcgcttgttcgagcaactgagtgcaatagttcttcgcgtaggaagttgacgattccttgcgtagtttttccagatcggcctccgtctgaatgctcgatcgagccgaaacaagtgacgaaatcgcgccgttgacggacgtgtggacctccttgttgaacgtgatactgcgggcctctgaatcctcgggtaggctggccaccagtttggcgagggacgagtaaatgtctttgacgcctctgaagagcgaaaaccccgtgatgtccatgtgatcgaggccggtgagctcctccatttggacccacttgccaatctgagaggtgccgctgaatttcaccagctcacccaccccatcgtgactcatagagatcgtgttgacaacgccgtcatttggctgccagtcgttggaaaggtgtagcgtgtctgttgcgtagcgaccgcccaaaaatattgacagcgcgtcgaacgctgggttcatgctcagcggatttgggagccggatcttcttcagcttgaaattcacggctgagaacgtgtcgatagtggcgtagctgtagtagtacacgtcctccagagtcgacacccagctgttctcctcgagagcaccggcgtgcgatagactccacagacacgtgtctttgaaggacgcgtcgaagagtttactcaagaacacgcggtcgaagtagtcgctgatactttcgctgtcgactctggttgaaatgttccactggtcgagctgagcatcaaatatcgctttggaagtgtcaccgccgacgccagccacgctgaggatgcctactaaagcagccttcataccgtcaccgatctctgaaaacccgtcggccaatgtagtcccttggttgggcgaggcaatcgttgtgatggagtgcacccagcttttcccgccttcgaacaacgggtgcgttgtcgactcttcctccgtcgccgagccggttgtgccctcctccagcatttgggtcagcattcgaatcgtttggccgcccatactgtggcccacgaggtagatcttgttgactgtaccgttctcgttgacttcgccccattcagggtagagtgccgtgtagttcctcccaaaccggtcgtgtccgtgggcagctgagtgttttgctccatagtccacgaccccacccttaatcggcgcgaagagctcgcaggctcggtcccaattgctcgaaaacgaaccgatggatgcggtgtacacggagtagcagtaagcgaatgggtgtttagcggacgtcggcagacacctcatcggacaagtgctcaagcacgaggactaacccatggtggacgacgactacctgctgacgaacgaagcgtgcgtagtggtggacgtcaagtactcgatgaaggacaagcgctcagtggtcgacaagaacccgatgatggacgagctctcgctgacggacaacttgctgacggacgagcactcgttggtgaacaactacgcgctggtgaacaactacgcgctggtgggcaactacccgatggtggccaactacccgctgtcggacagctactcgctaatggacgagtactgaccggtggacaagcactcatcggtggacaaggtgaacaagtacttggtggcggcggaccagtacacggtgacggactacgaggacggtaacgtcaactacgcgtacatgacacgatgtgggaaaggatttttatccgcacccatgtctgaccgctgggatgggacgacccttcgcctgactgtgaccggtcgcagtgaacaggaatacagtgacgtggagtgtgacatgtggatagtggatgcgcatggtgaatttggcgggacccggtgcttgcagtaagcatgggctcacaggatcggagatgtgcccaccggatgagcgctcatattcggtgtggagtaacacatcctgtccgtccgctgacttccctgaccgcaggataagcctaaggcgcgcaagtgcagccagtgaacgtatcctggctgctgcctgcattggctccgtcaagacatcggaccaacccccacgttcaccatgcccaccatgctcccatgcgcccaagacctcgctggacaaagtacactgtttgccggactggatcgtggtgcacccggtagcgacgcaccggaggccaaggtgccgtaccgaatgaggccggaccgaatgatcaattcggcctgacccctggtgtccatactggatcgtgaccgcaccaacaacaagtccagtactgctgtgtgtgtagcagcaatctaggaccggatcgaccaagaacgtcaagcgacacaggatggctcacgtgattagacgcagaggtccagtgcggatttgatgagacgccgtacccacgtacctctgtcgccagatgatgagtgttgccgaaggaacgttgacgtcgacaaggtgcccgataaccaagccaagtcaagcatacccaagctcagtgcaagaagatcgaagtcccgtgcacaaggtcgaagcatatccaagacaagtcaagtatagtgaaacctttattagaagtcagtgaagtgaaacagatagctagccaaacgtaagatcaaacagaaaccaatttgccgagaacacgcggacgtctttcttcgggctgggaattccccctgacattgacgtcttcaagagcttatacgtgggatccgccttcgtgcgatcttaaaacggaggacgtttcaaggcctcactggtgttgcgagcactggtgtagtggggactcaaaggtaccaaggcaaagtcggcagggactggggtgtcgcgccctggagtgatctgtgagagctttatttccaatttgcgtgctctatccgggcatccatttcatgtttcatcctgtgtgtcttaggcggtagaggtagtcatccccgagactgaattgatcgacaactgtgtgattggattggcttatattttgtattgttccctcactctgtgagggtggtgcgcgtgagtgagtgtgcatccatggttgaccagtgccttgggtgacggctcgtaagttgactggcgtatagaccccccacccaagggtcttaaagaataagtggtggctgtatattttgtgacgtttagttcggcattgtatttatgtgtgttggttatactgaattgtggatctgactgtggtcccttcgattcggtctgactttctgttcattcggtgtagtttgttttaggaacacacccagcagactcgattctgtatttacaacaactcactcggtgaagtccggtccgccaaaggtaaacgatacctataggtgttgacacaaggacacacgccaagtccaagcgatcctcccggcccccggttcatatcctgtgctccgaggactatcggattgcagcggatatctctggtactccgaaccgattcggtccggcatagtgcgctatacacctggacggtcaaggcgttcacccgcctcgcctcagctggtgcgcgtgcccggatttggttgcctaggatttcaccgcgagttgtttgtttgtatattgatttggtcttaaggggtgtttctactgactgcctggactaacagtttggttatggctggaaggaaggaagcacgtgaaggtggacgcggaggcggacgcggtgaggcgtcgcgtcagtcgcgtcgaggacaagggctgccgccggaggagcacaaggctctggacgacgttgtccgggaggctcggaaggctggcgcggagaagcgcaaggcggtcctggaagagaagaagaaggcgtcggcggccgatcaagatcaagcggccccggagtcctccgttctggatgcgcaccaagccaaacaggatgaggctccggaggcggacttgaccgagtctgtgccggccggcaccgaatgtgtcccagacccggtgacgggactggatcagggtgagtccgcacaggatgatgaacccgcccaggtgtctgtgggaggcgccgatgaggttgagccctcggctgagaatcgagttttggactctccccagccggacgacgaagtcgagattctggacgaagccccgacgatcaagcatgaaggcccgctgtcgactgtccaagaagacggcgtactgaatgacgaagccgacacccggtctgcgcccgcgcaatccagtccggccgcgaccgcccaagctcccgcgctcaagatggaagcccaatccagtctggcgccctcggattcgcgaggacccgacgagaccaaggctcaagtgagcgaggctcaggcgaaggcgtacgtggccggacaagtgcgtcgctgggagcagcatcgtgaacgcgctgccgtcccgctcaaggtggagtacgcctggcccgagccggcacccgacttcactgaatggtggactgccgcgctagcgacgtcgaagtacctgtcggaccggatggccatggcgagtcaagacgcggcgtggatcgcggagctttgtccggtacggctggagctgtgcctggcacaggatgtctccggcatcgtgattccgccgagcatcctgtcgccgcgcgagtgcgttgcgctcatccagtctcttcgctgccgatttcaggtttcacaacctaatcccgatgtggttccagtcgcagtcgtccagagtcgcaccgagtctggtgcgctctgtggtcgaggacgtccagcacttcatcgcgttcgagctgatcgagtggcgcgagttggcatccggtgtgcccttcaagatcgtgctggatgcgtcagacgcccaagaccagaccgagtcgaacgctggaaacactggatcgacactgtcacaagctgtgcgagcaccgatcctggactaccatgcagaagacaacgacggagatctattgatgtcggattacgaagctggactattgggtcgcgagttcgtcctgcgcctacgagtggccggcctccggaggacacgaagcccgcaagggtcgtccaccggcgaaccggattccaagcgcccgcagcacggaccgcctcgcccgccgtccacccagtccgcgtcgtcgatcccgtccgcgccgccgctgtccacgccgtcgctgtcttcgctcccgtcgtaccacgcgtccagcgagtctgagcgcgcagccggtactggagtgttggcgcaaccgggtccgccatctcgttcaccctcggatcttgattcgagcctgttcgggacgatggctggatccaacgagtcgacgttcagtgcggcgtcagcagcccgatcgtccagaggcagctcgtcttcgtcgtcgctgtggtccggacacgatgccgcgaggcgcatgtccgcgattgggtacggacccatggtgatgaccgcgcaggcaggagcgatccagtctggtgcaggcacaggagtcgtcgagatcacccggacagcactccctcggtcatcgacggcggtggatcaggacgatgtcgttatgtcggagtccgatcgcaccaccgtccggagtgaccgaaggtcgagagcttcatccggtaggcaaacgacgcccaggcgcgagaggcgaagcccgtcaccaagtgggtctgactccagtgacgaggaccggatgcgccgccgaaggtcttcgagatcgaagcgcgcaccgagtcggtcgagcaggtcgactcgatccggtcgatcaagccgctcagcgatgtccgtgatgtctggggcgtcccaagttgcgctcaacacgatgcgccagacgcaggaagccctggccaggatggagctgaaccaggaggcatccgctgccaacgcggcccgactgaatgaaggtcttcacagcgcgttccaggcgatccaagagctcgccggacgcaccgctacccctcaaggcagtgtgcagaccggatcgaggccggacgccccagtcccggagcctcccagcgatcccagcacgtctccaatgtcgacgatgcaggcgcatgaagtggcggctgccatcgagagcgcccgcgccgaggcagccgcctggagcacgagcgcgcagccgccgagttcgccgaacgctggagacaacaggaagcgcaagccgaagccgaacgaacccgatgggtcgaagatgtgcaacggggactcaacgatcaactggatttattccaagagaaggtccaccagattgaaactgagcgggagagggagcgagaatcttcccggaacattcagcggtttcagacccaccagttacacaaccttcgtgcaacacgccaggaaaatccagtggctcaagcaacatcgggatctgattcggtgtcgcatgtgaagacagagaccgggcgtgagacattgcacctagtatccagtgtacctatccagtctggtcaggcgcccatccagtctgcgacgccgcgtgccgacgagcttctagcagcccaacttcaggcgacgatcaacagcgttctcaaggcgagagcaaccacgggagccaaggcgcgcgctgttcaagctgcgccggcgaaggacaagcaggatgcccccgcgaaggacgcgaagaaggtgctcgtgaagcaggagcctgccaaggatgcgaaggacaccaggtcaggaccgcgcaagcgtccatccggtgggcgaagtcgcggaagtggtgacccctccggatccgacccggactcgagctctgatgacggctacgacgagggctacagctcaagcgactccgacgactcgctcgcgaacgtgcccacgcactccacgtcggtgacgacgaaggacggcaaaacggtgatgaacttccggccgtacgtgaactcaaactcactccaaggcttcgacgacaaggagtcataccatgagcggacacgatggtgggagcgattcctcaccttgaccgttcagggtggttggacggacagcatgaaggtgtacgagttacgcctgaagcttcctacatccgctcgccactggcgtgcacaattgccgaggcatgtacgagacgactggacccagctatcctatgcgttcaagcgcaagtactgccggtccaagatgtccgactcggagaggtactacacgatcgagcaaggacggactgaatcggcgcttgacttcttctaccgactgaatgcggccgcctgcaaggcgaatgtggagttcaagaagtcatctagggcgcgtaggatgcatatcatgcgttttatccggaagctgaccgagtcgaagcttcgatccagtctgaagagccggagtctgcacagcatcgacgacctggagttcattcggcgttaatacgaagacgatcaccaggacagcggacgtgagaactcggcatccagaccacgcgacttccgcgcgggcaacgtgcatcgagaccgcgaacgcgagcgattcagaccgaagcgtcctggccgcgcatacgtcgttcagagcgaggatgaatcagacgaagaggatcgtcatgtgcgtttccaagacgaggtggatgaacaccgagtcgtggtcgcaccaaagcacgactcggtccctcctgcctcgacacgaccggtggatcccgacctggtaccgccagtgctggatgaaggtgtactacgtgacgcagtgttcagggtgatgacgggctcaggatggagaccgccgccacctggccaacagtcaggggcgtctcgattcggtcagccctccgcgccgcagtcgccgagaagaagcaatcctgattggaatgaattctgtgagaagtgcgagaggcctggacaccgacaggagaattgctggatagacatcgtgtgtgatcgctgtcaccgacgcggacacccgatgcgcgtgtgcaaggtcaacccgtgcaggatttgtgaacgatttcatgaaggaccgtgtgaacttatgaagaccatcgaagcactgaagaagctggcacaagatggagcactgaaggacataccgaagaacctactggatcagctattggatgacaaggcgaattcagggggccgttaaaccactaaggccgctgggtggggacccagtacgcgccgggctgaaggcccctgaattgtgtgtgttagcctacgtcggaccagagctgaggatcagccaccaagataaccaacaatgcataatttctctgagcaacgatgacccgattcagcctgaccaaattgatgatcgttctggattgagccgttccgaattgcgagcaccggatagaccgaccgaatttcggctggaaccgggtgagcggtatggatggtgggttgatcatgagccagacaaggattcgcatgaggtggctacggtacatggcgcagtgaacgacttccgcttgcagattttgttggacaccggagcgtcggtgagtatgatcagtttggatcttgcgcgtagactcaagatcaagctcaaccggcataaacagatcaaggtgtccggactgggtggcaaaaccacttacatctctgctagcacgcaagtcaaggtcacgctcggatcgagagtggtgtacgtcatggacatctgggttgcgaatatcggtgaaggtattgggtatgatctttatgttctgtgccggcgttcggttgtgtgtacgagaaggacttctgcagttatcggatgaatagcctgtgctcatgtacggggacaaggtgcaacgccgacaaggaatgaggttgccagtccaagcgccggagaccctgtaccttcgacccggtgaggatgctgttgtgcgcatccggttaggccaagccaacccacagcgagaagtggtgtgggctggacgtggtgatcgctgggtgaccaagatcgtgtacggagcgaagtcctggcccgaggcagtcaaggtcgtaaacatctcgtcgaacaatctctggatcgtggccgggaccacgctggcctacattgtggggtatggattcttcccgaccgtaggactgttcgtccgtccaggatcgagggcatacaaggaatggcaggtgatgatctacgagaacacattgtccaaacagggtcagctgagggaacaacgtcggctgcaagcactctgggatcgtgaaccgcccgccgtggagcctgcgaagtactcatagtcgaccaagttgatgctacatccggacgggaagaaggacgtgacgtgtttcacctcggtgttgcagaatccggtgaccgagtcggacaggatcgtggaactcggtgaggatccgttcgtggaggacctggttgagaaagaaccgagcttcaagcgcatagcaccgctgacgaaggaaccagagactgacccgactgtgaagtctagtgcgactccgggtggtgctgaggacttcaccagtgacaccgaatcggatgacgaagagtttttcgaggctgtcgcaccggatgaggatgttgcacaggatggagatgacgaggacttctttgacgcggttacaccggatgaagacgaagtgtcggaagacgcaccagatgtgaccgacgaggatgtctccgacttaccatccggtatcctgccctgcactccggcgcagaaactcaaagaagagtacgagcgggtcatgcgactaagtgtggaggagttggactttgaaccagccgtgtacattcatgaagggatcgatctgctctcccagctgcgagaccaactcgcactcctcccggaggtgcaggatttaagtcccgagtgcgagatgttggcgaacctggcgtgagcacgccagatgacgaacaccgattacgtggtatcctgaggtaccaccgaagtatcttcttaggtgatggaaatgcggcacctgccccagctcgcggggtcgtttgcgatctggatgtgggagacgctaagcctgtcgcacaaaggacacgctcggtcgcgtcacaccttgcgatgaaggtgtacgttgctgaagaagttgttggagactggattgatcgagacatctacgtcaccctgggcgtcaccgatcgtgatcgtactgaagaagaacggggtcgacatccggatgtgcattggttaccggatcgtgaacgggttcatccagttgtccaactatcctctcccgctcattgacgacctgctaatcgggttcgagagcgcgatgtggtttatgagtctggacatggccagcggcttctgggcgatcaggatgacggagcgagccaagctcatctcggcgttcgtgtcgccattcggtcactaccagtggcgacggatgccatttggtctgaagaatgctccgctggtgtaccagcagatgctcaacaactgtctgtggggctttgttcgactaccacatggtaaggaagctcagatggatcaggacgtactggattatctgggtttgaagccgcaagaggacaacgtcggagggagcgacaccggatcggacgacgaaatgctgtctggccgacgtctacccgcgctgacagaccagatgactgtgttccaacgtaacatcccggcgccgatgcagatgggccctgtcctaggacggagctcgttcattgacgacatcgcgcatggggcgcctacgtgggatcaagttcgcatcgatctggatgcgctactgtttcggttgcggtattggaacatctctgtcagtctaccgaagagtgaattcggtaagcgctcgatcccgtatctctctcatgagatcagtgcagaaggactcagggcgacgccgaagatcgctaagggcgtactggatctaccattcccgtctactctgaagggggtccagtccttcctcggcagtctgaactactaccacaagttcatagaggatttcccggtggtagctgcagtcctgtacgagctgagcgacgaccaagtgcgatccggtagggacttgtcgagggcgaaggaagcgttcgagatcctgaagcggaagatcgtgtcgaccccattgctacgtcatccggaccggaccaagccgttcgtcatcattcctcacgcgaaccagtgggcagcctgtgcagtcctcggtcaaaagcatgacgaactgaacatacttgcttgtggtggagagagggctgtttgggctcgaccaagcgaattcgagaatgaggagagagacgattaattggtatttggacggggtctagactctgctgagatcggcccgcggtgtgcgaggacggcaactgtgctgtcaagatccggagcccacgtgatggcggttgattggcgtcgtcgaagccgacgggtcatgtggccacagggtgggcgtaatgcatgtgcaggcacttgtggtgtttgttcgtctacgccgacagttggcagtcagtctatacatctccttctctctagaatctgaggttggccctacaacaactggcggaatgtgtcaaagctgcagcaactggtggtcccggtgttgacgggcaccgaaaatgtgcgcattggccaagttctcctctgtcgctcggctggcaggggcctatccaacggcatcaaacgcgcagctccttgctcgcaggacgcatgtgccttgctacggtacggtagcagctagttgcatgcatatagtgtagcatgacgcatcggtgctgataaagatggcgcacgcacaatggttgggtcgctgctgctccttcgcattcggacttcgttcggggaagcctagctacccaatcgacggagtgattacgttgagtaccgaagtttgtatgggctatgttgaagtcgacgtccaattgcatctactgcagaagtctggcattgctcgtctgaacttgtctacggtataataaatggatgcagtaaaacgaagaattggcttgttacgtaaaacggtatcgtattgtatctctttgcgcggattgttgcacctaaccaacactgaacgagaaatccttgctcgggtttggtcatcgaattcccgtcgaccgggccgttgtactacaacctgtagttctgtctagctgcgtgatcaaaaaatgaattgcgttgatattcttacgtggaagcaacaagactccgccaagaacatggctcgaaaagcgaaaattctgagcgtcatccatccattacacgtcaaaacacgcaattgcctcccctcttcctggggtcaatatcttcctagcctaaaacagtggcgccatgtgcttcagcatggacgaattcacagccttgtgcgttcctggaggacacagcatctcatcctgagcgtccatccatattttgcttccatcaacatccacctcaatgcgtagtcggccgtccacctcacacgcttcacaggccgcgacgacagcgttgcgccactcgggatacttcttcgtggcgacttgccgacccaccatcacagagttgcctaccttgaaatcgcgccaattccgcactttcgtatgcaacggtgagatacgagttgaagtgcgttcgatccactcatcccacttggatgtccagccacgatagtgcagtttaaccagcgttgagctcaaaccgaccacgcgcgattcgtacctggccatcgaaacagttagatcactagccatttaaaacagacacacgaccgagtaaagacgtaccaaacattgtccgtatcccgtgcgtcaattagctgatcaatctgaagttcgtagcgccaagcatcttcttcactgatggctgcttcgacttgagatgtttgcactacatctgtcgttgttggaagcaattgattgagagtaggagccgcaacagtgttcgcagaaggaacacgcggatcgtaacttgtcgcgttgcagccagaatccgcatcgctggaagtgcttccatcagaaatagttgcttcatcttcaacaactgcttcctctgtttggttgctggggtcgttggtgctgtctacctcagcaatatcctcgtcttgcccgtcatcaacgacacaccactcatcaccgtctccatcactatcggctaattgcatagcgcgcgtcgcgtcgcggatagactccacctcctgtgcaggctggtcattacgaggaactgaagaagctgaatcgccaggtcgttcgaagtagttaatcagcagagatggcggtgtagccagaactgccgtccctgcacttgcgcccacattgactgctttatgggttcccggcggacaaaggagctcgtcctgagcatccagccatttcttctttccatcaacgtccacttcgatctgaagcgagccgtcttcgtcatcgcacgccgtcacctgcgcattccgccactccgggtatcttttcccagggacatcctttcccaccatgatactgtcaccaacttggaaagctcgccaatttggcacgttcgtatgcagcggcgctagtcgagccgaggtccggcgcatccactcgtcccatttggacgtccagccgcgatagtgcactttaacatagacggcgtccatatccacgatgcgagactcgtaccagcgcttgtccgtgtccagagcgtcgactaactgtccgatctgcagctcgaaacgccacgcattggcctgaacgtcgctaaagaacttgccgtgccgccacgcgattagctcatcgctacaggtagcagcttcaaacttgctctccaccagcaactggcgccactgcttttcactggacaggtcaatctgcgccgtaagctgcaacttggcccctgtagggtcctcagagctctccatcccctcagcaccagcaagaactgccagcggcacccacgcctccttctcatccgagcgttggcacactcgaatcacgtcactgacattatctctctccacctcgggaaacacagcctgcaactgcgggtgcacgagcaccagctcctgcagcatcctctgcagatctacagtggagctgctggagctcgcagctaccacgagcggtctctgattttcgcccacgagctccacgggtgcttcgagtccgttgtgccacaccaagagcttcgggcattggcgggtagataaatagatggatacacacacaaacagctacacagtcaaccaacaaacagagagctcattggcagtagctatcctgactgcatctggtacctgaaagagactcctgcccagctcgctctgattcccaagtgattccttctctgtaacctgattctgcggctgtgacgcttcaagaccgctggcttcgtcgctggccttcgtcgggcgggggctgtcgcctgctgctgggccgcggctgctgacctcgcgccccaccacgagccagtcgtcgccgtcggggcagcttggctgctcggcggcctgcttggccatacttcgggcgtcgagacttgacgggatccggggcgcttctcgaatggccgacgttgaacttggtttccgatctgtgtgcggtacgcgaatttggtgtggcgaacatgaagccaacttcagcaataggttgccgacttgaccagctggcaaaatgttgtggcaccgtgatgcagacaacacgtgagaggcaaggcccgcttcggtcttgaaggcagtgctctgatgagcagggccaaagctggttgaagtacatgtattagtactttgagttttacctctctttcgatcgttgggccttcaggtctgagtgcaccggttcagacagcaccatccagcaccacctcggccacacggacgctccgaagagataagctccagcagcaaaggaaacccaagcgcgtgaagcagcagtcgttacttcaatgcatgcatacggcataaaaatacctccagttacggttcttgccttctgatacccccagtgtgtcatcatgaatgccctattcgcctctatttagtcattcctttaatctactacacttgcatccagtatgtatcgcaatatagggacttgataattccgtttagagaggtgtatcgattccccagataagcatatcggcacgtgcgggtgcactcgtcgtttgacgtgttggctccgtgcgctcccattggccggcgccagcgatctgtaaattttggtgtggcgctacacgaattgcgcgcgcgacgtgtttaccggccaattgtcatttgagcccgagcgaggaactcgagaagatgcagcagcagccgccgccgccgcacgcgatgggcgcggcggactcggacccgaaccgcctggtggccagcgaggaggagatgctgcgtctggcgccgcagccgcacgagcgcgtcgtgtactggggctccggcagtccgcagggtacgtctgcgccagcaataaatcatcacctgccttcccactgagacgacgcttacgctacgtgtgtctgccgtcgtattttgccgcagcgtggcgccttttgatcgcgctggaggagaagaagctgccgtaccgcagcgtgtgcgtgagcttctcgagcggcgtgctgaagacgccgttcttccgcgcgctcaacccgcgcatgcgcatccccgtgctggtggagcctgcggagctgccaccaccatcagaggacgacaaggacgacaaggacacgcccaagagcaaggtggcggaggccgccatgggcatctcccgcctcatgacgcagaccacgtcgcagtaccgcaccatcgtctacgagtccggagccatccttgagtacctcgagaagaagtacccggaggcaccatgcatgccggcgtctcccgcgctctacgctgtggcgcagtcgcgcctgcacgaggcgaacgagattttgtcggttgtgggcgacctcgtggtctacctgcgccggttcccgcaggagaagcgcaacccagcgattgtcaacgccaagtgggcatccgtggagagcgagctgagtctctgggagtcgtacctcgatggtcaccagtttctcgtggacccggaggtgccgtatttgtgcgatttcacgctcttcaccaacgtcgcctacgctgttcggtgtgggctgcagcttgatggtctctacccgcgactggcaatgttctacgtgcggttgtgcgcccgcgcatcgattgaaacgacgtggcccccgcactggcgaacaaccttcggctctaaagtgcttaccaagacatgttgttactgcggcggccgcgcagaccagccctgcgtctgtaaacagcgcccgccgatgccgccggccatggttccgccgacgtcagtgcccaccacccagcaaccatcgtgatacactacactaggacaaactgccatcgaatccaatgactctgcgttctgaaacctacgaaacatgatgcagacgtacaaaaagtagtggacacaggaccttcgcagcgaacactggcctgcaaaattacgttagtcgttcggattgatcacctctttaacattgctcacgctttcctcatttccgtgaccagggtcaccgggcttatgtggtttcgtgtgatcagcgtgctcgctgtccagctcagagcagtccgatcttgcgcaggaacacttgggcgcggcgcagtgtcagctctttctccttctccgtgttcactacactgcattcgaccatggtgtcacgctcagggaagtgccacgacttctccatgaactcgtacacctcccaagttgcatccgagatgtcgtttttccgagccagcattcgtcccttgataatctcacggtcgcactcgcacatgatgaaggcaaacaacgcaccctcagtgcgagcagctccgatgaatctctgccgctgaacgggatcgcgaaacgtggcgtcgacaacaacgcgctctcccttgcgcaaatgcttcacgcattgcttcagaatctcgtcgtaggtgcgctgagtcatttcgggggagtacagcccttcttcgaagctgccttcgccttttactctagaatgttcactttcgccaccagcgttatcggaagactgctctgcaagctccttacggattgcatccgagcgcaaccacacgagagtattgtcatcttcagccagcatttttgccaggttggacttaccactcgcaggaagacctccgacaagaatcatacatggtcgctgcgcaggcggactaaggagctccagtgccaccagccagtagcaatgcgcgcgctgaatttcatcgacacgctgaacggctgacagtgtagggtccatcacacgaaacccggatactttagcccgcactacagcccgatatgcagtataaaacgtgaagagatcagcattctccggcgagtcttgcactgtcttgagcaggtattgcgcctgtagaaagcgtgccaagtcgggacggcccttccaccaaatatccatcgccaagaacgctacatccgagagcggatctccgaagcggaattgttcattgaactcgatgcagtccaaaatcacgaagcgctcgcttttgccagccgaacgcggcagtctatagacgtgctcaagtcgcagatctccgtgcgtatcacaaatatagccgttctccacacgtgactcgaaaacgtgcttgagcttcttcagccacgtgtacgacagctccttcacgcgacgatacacctgctcactgaccgtcatacccgtgtgcgaggccgtttggtgaaagttctcgtcaatgttgtgtcgaatcactggctctcgaccgaaatgatcaatctttggcccacgcctagcgtccgcgtgaaagtccacgagcctctcggccacttggtccaacatcttctccgtcaactcgccgtggtccatgcggtgcagcagcgtgcagtcgtccggcagccgcaccatgtgcaccgcccactcgacgatctctccgaactggtcgttcagccaccagtccaggttaccgctcttctccggcgtccaaaagtcgtcgcagcgcacgcagatctccctcgtcgccctcttcatggacacgggcacgacgcccatgtacacgtcgggcgcgagtcgctggttcagctgcacttcggcgaagcacgcctggaagcgcttgaacagcgtcgagaagtccgcgaagccgaagtccacctgcttcttcaccttgtacacgcgctgcggcagcaggaacaccatggacatgtgcgtgtgcaccacgcgcaaccggtcgacgttctcccgcccgttggggaacgccgcgcgctctgcatccgagtccgaggacacgtacgacctcggatccttcagcgcgcgctcgagctccttctgcgagacctcgagcggcggcgcctgcttgtgcttcggacgccgcggctccatcgtattgcttcaggtcggaaaagctcaactgccacttcaacttgcgctttagtgcctctctcactccgatttaatgacttttctcaatttatgtgtcatacacattcacctgcccccctcttcaatctcacaacctcgagccggagtaatcaggaagatggcggagatgctggcgctggcgctggcccctcccccgccgcccccgccggaggaagacgcgcagccggcgccgcccccagaggatgaagcggacgcccccgagaccgcgaaagaggccaagacgctggcgggtctggcgcgccaggtgtccaactggacgctgcactcggaccacgagctgcacgcgttcctgaagcagtactcgaccgacctgttcgcgcgcacgaaggacctggaggacagcgtgcgcgacatcgcggcggaggcggacgcggcccacgtccgactcaagaacacgttcaaccagttcctcatgctctccaacaaccagttcatcgagaaccgcgtgtacgacgaggagcaggaggatttcttcggcgtcgagagcggccaggctggcgcggagaaggcggaggacaaggacaaggagaaagagaaggacaaggagcaagcggacgccaccgccagcgcggcttcagctgctgcagagagcaaggagggagtggccaaggcggcggccgagtctatcgtgaacaagtacagatcggcgctggacacgggcatggaggccatgaagctgttcgtgatgatggacgacgaggacgacgacaagagcgagacgccgtcccagttcgacacggtgctggacatctacaacgagcgcccgctgcccttcatcatcggcacgagggagttcttggaggacgagacgctcggattgggtgcggcgccggaggattactccgacagcgacagcgactcgagctacggctcgtcgtacagcagctcagactccgcctcggactcggactcggcgtcagacgcctccccggcgccgagagagaagagacactcgtcgcgttctcgatcgcgctaccggtcgagttcggaggagtcggatgagtcatcggtggcggctccaccgccgcgaagacgcgcggactcggacgagagcgacaccagcgggctgtttggtcgtccgccggcggttgagccgccgcgacgccgcgcggactcggatgagagtgacacgagcggactgtttggccacccgtcggctccggaatcagcccctcgtcttcctagagcgtcttctacgcgcagttctcgtcgtggccaggtgtttgacgacgacgacgacgacgacgacgacagcgatagcgacagcgacagtgaagctgaattgacgacaactagtggcctatttggtcggccgtccagcgcccccaaagacacgaagaagtctccttctcgatcgcgctaccggttgagctcggaggagtcggatgagtcatcggtggcggctccaccgccgcgaagacgcgcggactcggacgagagcgacaccagcgggctgtttggtcgtccgccggcggttgagccgccgcgacgccgcgcggactcggatgagagtgacacaagcggactgtttggccacccgtcggctccggaatcagcccctcgtcttcctagagcgtcttctacgcgcagttctcgtcgtggccaggtgtttgacgacgacgacgatgacgacagcgacagcgacagtgaagctgagtcgacgacgactagtggcctatttggtcggccgtccagcgcccccaaagacacgaagaagtctcctgccggcgtttcggtcctgccgcctcctcagcagaccagacgtcttgatttctccgacgatagcagcgatgatgacgatgacggcggactctttggggccgcacctgcaaagccttctgcacccgctgcgaagcctgttgtggtgcctcctaccgctgccatcctgccacctcgacgttcgacatattctgacagcagcagcgatgaggacaatggcgacggcggcttgtttggcgcaaaatcgaaagctgctcctgtcgcagcgacaccagttcctgtatcagctcctcggccgcagccagttcaacgtcctccacaaagcggactctttggtgaaggtgacagcgatgatagtgatgacagtgacggtggtggtctgtttggtgcgagcaagcccactgctgctgcaaaaccacctcctgtaactgccgctagaccaccaccagtggttacgcacaacgtcagtgacagtgatagtgatgacgacgacggcggcttattcggcattccacaatcagctaagcctgttacggctgcgcctgttgctgcacctgcatcaccttcacctcaagttcgacagtttcaagtgctcagtgcttctagcgactcggacgatggagggttgttcggaggccctcccgtgcgaaccgcaccaacaccagcgacaattgtaccaactgcgtcgccaccccccatccccgcaccaactcctgcggtggctactacggtgccaccgactcgacctctgattacccgccaaatatcgtcggatgatgacagtgacgactggagcgacgacgatggcggcctctttggcgcagctacatcgaaacctgctactacaaaacccgtcgcagccccaatgcccgcaacaaccagcaccccggcgccagccccatctcaacctgccgcacagtcgggctcactcttcgaacctccagcaggcactgctggaccggctgttcacccccagatcccgagcgctgctgcacgaatgcgcgtcgccgaatccgagtcggactcggactcggactcggactgggatggggacggcggcctctttgggcccccaaacaaataatgggtggccgagggtgtggatagagaaaaagggagtggcgatctcacatcgatggacataacgagattttttaactcggctagtgggtagttttcttctcatttatttgtgacctcgggtttgatgcaggttggtacgaacttggacgcacaaagatgtagtaagtcacctaggctgactcacgaagactgtgctagctttccctagcatgggtcatgaaaggaataatgggggcatagcccccttataatgaaatgtgcataaagactttttaccctttttacaggtactttttactccaatttatgaacccctgtattacaatggagaatggggtagggcaaatgaactatcatagcctgcccgggggcgatttcgatcgaattttaccactttttaagaacacacgaactcttgttgaacggcgccaaacgcgacccttcaaatgttaccttgttcgaaggtataacaagttattaaactgaggtcaactttttatcgaaccggagatcgccccgtttgtacagcaaacaaatgattgcgttaatcgttgaagtttaaggtaagagttgacgaccgacgatttatgcacttggaccgtggaacccttttcaaggggtggctgaactccggttaaatgtggtaacggaggcaaatgacagtggagcccgccgtaaaaaacatatgagaggtcaggcagctccgtaaaaagtctccgctaacgtacgaaacaatgtacgaaagagtcgtttggattaagttattcatagataacctaattcaaggtatcggtcagtacactgatagatccttggcaaaacttggcatggagcagtgaagtctaaatccaaaggctatactatgctaccgctaactattacgaaccactcatgcggaagcaagaaggcagcactagaattagttggcatattagttgctgcaatcgttgactgaagaaatctataaatcgcttgctacacacagttctgcagcagccggcgcaaccgattacgaagattggcatgatacagaaagcggtgaccaggccagacgtgccatatagtcgagacaatagtcaggatgtatgctctgtagctgtgaagaaaacgtggagaattctctttttgccctgacatttggtatattattctgacaaccttgataaatagatgaagtattgtcatttgcgcaggaagtaagacgtcgttgccctccaaaatcgcatgctatttcctgagcgagttaaagtaggaggaggttcagactagtctattcaacttatgttatgagagtgtctggaatgtcctaagccaggtgatcagcgccggtacctgagatgatcccggtggctgtacgtggctcgcctctggtcgaggttcctcttttggtgtccgctggaagagatccaaacagataagtaatcctgtgccttgaactattgtccttggatttccgcgttccctacgtgctagtgctcgtaggtgccggagtccagcctgttggaatgctgcgacgctgcttgcaatggtaacctggcctccattgtgaaccacttggtttcgttgggttcataggactgtcatgcatactgtgctcataacccaccatatccgtttccattcacgcgcgtagtcgtcggtctgatcgggaaacgcggtgctaaatcgacgacgcaggtctgttgtaaacggtggtgatactcgagacgcgcaattcgccgtataccgaagaagctgctggccatcacacgttcgtctaccccagcagctgataagatatttccagcatgcttgggcgcacggacactcccaaagtaggtgcgtgagtgtctcctttcggtgctgacagctttgaagcttgcgacaacttgcatccatttgacggccgtcgaagaagagattgagttgcttcgttgccgtcggccatcttgggtgttggggtttacgcttgttggatagcccagtgaacgccgttcggttctggttttaggataaaatatcctccgtcggtgccgtcggttccttctgggaccccttggacgagtttagtgtctaggactttccaatggtaatgatagtgcagattgggtggttgccgaagctccaccgttggccgcacctgcagttcctctgcgatatctatcggtggggaccctgctataatagccaatgcccaccgacacaatttcggagccgtatgatgcgttgttgcgtccgacgtcaatggaatccggagcgtatacgccgccagtcctattcgctgaatgtgcaactccggtagcgtgcaaacacggatccggttatatatcttggctgtcagcatgcccccgtttgcttctcgaatccatgggttactgctccacaggtatgtgggccagaatgtcttagcttcagtcgaccactcccgttgccaacgaggaagttcctcgtaaagcctgatctgcagtgtattatcgtccctccaacaaatggcctggtcggctaaccgggccaggtcccgtgtaccttgccttagtaacgtctccttctctccctgtgtgggttgaagccacccgcctagcagctcttgcatccttttgcaaggtgtcttcggctgtcgtcgcccggtttccgtaggggttattgtactatcactgtcggcctccccacccctgaatgtccatgctcgccatgctgcggaatacgtatcctcttgctgcatttgccagagcatcgcatgtttcattttttgagattttacggccacctcaatcgatacgagcccacgcctccggcgcctcgtggagtgtacagaagtccaggattgaccttatgcctgcttgcttccgttgctatcgaatggcgccacaggaattgcttctgcaggtgtcgaagttccttgcctgcccacggtggtatatcgaacgctgcggccgtgaacaatattgctgttagcatgatcacattgaggatggttactcgtagccatctgcgccgccgttgctaatcttcgtttgatattgcggatccggtgggcccagttgtgacccgatagctcctgagttcctacttcgtaacctaagtaacgagtagtttctccatgcccgagtaccggtattccatatagctcattcatctccaccgccgtattcagaaaaaataacttgcttttggtgggctggacaattaggcctgacagtgctccaaagcgccgaattatatccatcaccccgggagctgcttggcttcttgaaggaacaccgtcgagtcgtccacaaaggccgagaagcggtgctcagcatccggtttgcccggtacgttaatcccctgcaactgtgagtcctgtgagatagatagcgccaacacctctgccgcgatcaagaagagcaaaggcgccagtggacagtcttggcgaatgcctgatagcacctctgtcggctgctagagttccccatttaccaaaatgcgagctgtagtcccatcatgcagtcgtcgtaacatatctacgaattctttcgaaaaaccaaagcgtaatagcgataggaagagaaattccctggccattgtgtcgtacgctttcttaaaatccagcaacacaatcaccctgcttagctctgccgctaattcaggttcccctctcgccgatgccaggaccgccaacatcatcatcactgttttcatcatttgtctgcggtgcacgaagccttgcggtgtcgttccaataactttgcctagaatccgctgtacccttgtcgccaaaaccttggtgaatacttgtatcctgtttgtagaagcgagatagggcggtaatccatggcattatccgagtcccctttctttctgagtggtatgatgagtccttctagaaacgacatagggggcttaccacctttcagcagttcattaccgagcgtcaccaacgcaggcgccaactgagcctgcgcgtccttaatgaggtcgttgttcaatccatctgcccctgccgctttgtgtcgatttagtgccgatatcgcctgaataacttagttcaatgtgatcggctccatcaacatccgattgtcgttctccgtgagctgcctttgaaccggtatctgcacaaagtcatcaaactcgtgctgtaagtccgacggtggtactgagctgtgactttgccccaggatcggcgcccactcggacgcaaatttgtccgctgtggacatgttccgggagaagctcgctccgttgatcggacgaatgctcgacaccgtctgatcttgttcccaatccgagatgcgcctgaattgccaccggaggtgttccgtcgttcgttcgagccgctgtccttctctcattaaggctgcctcatgatgctcctctgctacgtttgctgttgcgtcctctatggtaaagatttgtgcgcgcgcttggctctgaagcttcttgacataccgagtcctgcgttgtttcacccgcttctggatgcgtttgatacattccacacaggccctggttgtctgattccaagttgatgctgtgatgcctctgccgacctcgcgctcaataagctcctccagcagttcactgatcacgcgctggggctgagctgttcgaatggggtatgttacctttcgtgcactgcgccgtgggattcctaacacagggattgtgagatgtactttcacagtttgatgatctgttttcaccggcggaacttccaccgagacccattgtacgactgcagtccaagatcttggcacgtagaacctgtcaattctgcttgccgagcgcttattccaaaaggtgaaccaatctgtcggactggggtttgccatttcttccccagtcgctgacaagatcgctgcatcctctacttcgagctggcgcaccaattcttgtagctgcttactttccggccgtccggctgatcagtttcccagcctgtccaaatgtgggctctgaacgctgttgaagtctccacccaggatgatttcctccccagcccacggccaattccggatcgacctgaagaattcctccctgtccgtagactgattcggcgcgtagatgtttaccaacaggaggtcacctagtttcaccgccatcgccctgctcgaccacacttcaggatgccatgcttctgctttgttggccaatgatggacccgtccgttttaccttgattggcggtactccaatatgtaagctgcttaccagaccagtgctgcttcccccacagcctacgccagtcttcctctaaattgtctgcttcttcctccgtttccacatgcgtttcttgtaaaaatctaagtagcgggcgctcccgctgcaactcttttcgccacgcctccatccaatgttttctctctgttgccgtgaacccccgcagattttgcgttgctattctgcgtgagatgggcttcagagccgccttacccttccgtttgctgtcaccaaatgcctcctgtaggcggaagtgccgtccgaaggcatccgagggtacagtgtccatgggcaccaaaccctctgtgactgcgctgaaggagaacttaattctggagagctagctgcagctcctccctctcgaatgtcgaggtgaagtagctctccacagctgcccagttgatttgccggtctgccgcataatacgcagctttgtaactctcgatcttgtccagggccgtaaggtgacgccgtacttgagttggtacgccgttctccacgtcatcttccgtaccagtgatcgcgcgaatttcgggatcgtagataatggcgcacaagatatgttgagcgagcttgagtgtattgccgaaatcgcattgctggagtagcgagacgctcgcgaacgcattcgcttccagtcatcgcagttgtcaaacggcggggcacgcttttcctttgtaggtggttccgctagccgcttagtccaatcatcaagccatgtgtggatcgacttgtcggtagtccgaccacgatactgaattaaacccgctaacatacaatctttccgccaggccgcagtccatgctattagaacatcatcactcacagcttgcagcacgtcggttgcaaacgggaaccgttcaacaagtcggatcagtcgtcgtggttccacttcggctgctcgctgccacttatcgttgttgctcgtggccaacgggaacggcgtctgtgctccttccgcccactccggagccaagaatttccagtggtgttcccagtccggtctcgcgacgactggcgctgacaattgaacgggttctgtcacttcacgctttcctttttttccgcccgactgcggtaggtttggcactgtacaatgcgccgaatttgtttgtcacagcgagagcagaacggtgatccctcttttgcattgtcttcttggatctgtgcctcagcttcttctgctgctgcctgtacggtttccgccggcttggtttgctgctgaccctatcaccggatgggacgtaggcctcgtcacgaggatccgtggcgctacctgttgattcctcactgtggtcctgtatcggatctcgttctcggtccagcgctccttccttgttctcccgcacatgggtttgccattgcttcaacactactaaaggcacttggtgccgctgaaggaattcccgaacggttgggctcgcttcgtcctccagggcggcgctccggagacggttttgctcttgtactgatagtttcgagacggtattgactaggaatcccaagagttcatggtatcgatctgcctctgctacccgtaaaatatgttggatttcacacttgagctcgtgtggtatcgtcatgccttgcagccggtggtgcagttcatctagcgagccatcccattcgtccggattccatggctccgctgtggcttcggcttgcgatcgcgataacccgtcctcgcgaccgggaatcctctctgtatcctccatttcaaaatcttccgtcttcgtcccctcccgcttccctacatctgtgccttgtggctgtacgtgcacgaacgccgagtagtgacgcccccaaaatcgtaggactagtggtgctgcgtgtgctttcagcttgtcctcccgaatacgttggacgcaatcctggactgtcagcataacctgttgaccggtttcgaagacctttttgaatcgcgtccgcgagcttggtctatacatcacgcagttccacgcttggtcaccttgcgtgttgtgcgcgaatacatagattgatcgtttgagaaagtttactgccatcgccatcaggtcactgccaccccagttgaacccttcaaccatggtgtctctgtcagaagcacttccagcgtactcctccaagtaccacttaaactgcttcttggaatcacctggcggcatgttttcccaccctcgctgcacattcactaatgtcaatgtccttgcgtagtgatcgaactggtcactcatatgaagctgtcctgcgtgtttgatgcctcgcttgattgaggtggttgccttagtcagaacgtcgtcatgagcggcgagatcgtggttggctactgcttgcacgatagcgatcgccatgcaattgcccgtcgatggtgtcgtcacctcacgtatatgcagtagccgttcgaccacttcaacgttgtcaatcgtggtggggaccaccgcatcccatggaatgttgaggagttgctttggtagcagcggttccaccacagttagtagctcctggcgttcacgctgttttaaagccactagttgcggggctgtcggcccgccggcggcgtgcgtctcactatgtgcaacaggctcttttcatctttggtaagatccttatagagacgctcttttggggtttcttgcgacgatcccgatgagatatcgatgatttcctggtgttgatctgccggtggctcgattccagcgttcctatcctcctcgtcgtcttcctcatcttcgtcctcagctaggacgtcatatcgcgagtgcgctggccttattttctggtccagggctgccttgtgggcgaacaaggtccgtcctcctttcagcttgactgttacccatttgggttgaggcttgggcgtaggtgcctgctgttgctggctggcttcttctcggtggtgatctcctttcggctctcctgcctgatcggccgccggttcgagatctcgctgcggtcttccgagctccacttcgtggccattcgccgtcggactcacggcttcttcctctactcgttccgcttgctggtgcaggcgcaaacgttttgctgctgcctccttcatttccttcatgctgccgtacggtttggctaggtccacgagattgatcacctcctcttcacaagccaccagtctccttgcccacttaattggtcgtccgtgtagttgcaccgcgcgagagtgtgtcctagctgcccgcaacgtagacactgcaggcgacgacctacagccgggtgcttgatcacaatgcttgccccgaaccaaatgattcgttggattccccgcaggaattctgggcatcctgctaatttgaatgttaatttccacactgtagaagtgcgagagttcggcgtgcaggcatcaagatcctcgaagtcgaattcggcctgactgtgctttttaaaaaaggctgtcagtcgtccgatgtccatgaagcgcgtgatgttgtatagacggacttcgtattccgttggcgggctcatactaacaccagcgcgtcctaactggcgctcccacggggttccgcggtcgggcccgtgtacgttcatcaagcggtacactcttcctttgaacggcactggtgtcagtgcatgcctcgcagctgtcgcgcgatcaaaaaagaagaaatggattgacttcttgaccctgttgaagcttatcgttttggtttgacttagcaacccatgcagctccgtcaaattcacattagcccgctcggctgcgagcagaatgtcttcttggaacgcacgtgtgtgctggcggcttacgcgaacgcccgtatagccgttcaaaacaaacatgagctccccttcaacctgcgcttgaatcgtgctgtacagacgcagccgctcttgagagtctagaatacttctgatgaaatccggcagacgcctgctgacaatgctgccttctgctagaccttgaatgattttccattcatcatcggagccctcgcgcagctggtgctgcgcgtaccgggttctcttcgcgtgcatattcccttgaagcgttcgatgtcattgcttgagtacctgcgtggattaaacatgaacactgggaatgcctgggggtcctcgctgagcaagttaaagtagcaatatgcaattctgacggtcttgcatgttcacacaaacgccaaatgtatagctaacactagcgtttgttaaatgtttgttactgtatagtgaatctggcgaacatgtatgtggagtgagagtctcattaggataattcaaagtattgtattattgagtaatacaatttcagtattaatacagattgtattaatacttatactcgttttttgggcgaatatataaggataattgaagtaatactactcctcagaattggtaataccagtaatattttacggttatccgggccaacttgactccaaattagctactattcgtggagggtataagtgtacattagtaatctttatatatattgtggccgccaagcgttttgcccgctcggtttttcacgctctcaagggatttagcatcaccaaatcctggttgatatatatgtaaatccttcagaacgcctacggacaactgggcattctggtcgattcatatatatatcgaccagggttagcctaagtgaccaatcaacacctttaacgagctatacacatgtacgaggccagctaaatactccagctggttaatacgagagcgatagtgtcgtctccatgctcggtctaataaggagtgactcgaggtatatataccatcccagtgtctatagcagtaaaattgcatcacacagcgtcgctcacagactctggacaattgtagtgaagtgatacaatgtgcaaattatacgggcataaaaggctttatacatctgcgtttatgttaaagcacctgaagtaacatgcatcgtgggccactaacaatattgggctctacttggctaattattcaaactgagctattaccgacacttcaacgcgatttgcgattcggaaatacataagtactttgtgtttctttagaggcttttagaagcaccgataaatgaaatgacgtggccaaaagtagcgtagaggtcgctaccggcatttcctacgatcaattgaaccaaggggacagctttagggataccgtttggtaaaagaacatcgggtaaccccgtatcaatccgcatacatggttgatgaagcgcacgtggtgcatttagaacatgcgcgcgcccactaatatgtttccacgaccgccaaggccttctgtgaacgtgcacttgccccggtatgatttgacttctagattgttttttatttacttgaaattagatgaacggtatgagagctcactgttgcgtgcgtggcaacatgaaaaagcctttcgataccgtttaaacggcgcttctaactattgaccctaactacattagcagcgttcgaataagaactggtccaagcatttcacagtcccgttttacctcaaatggagagtgcatggggtctgggtgtgcaaccccagcacacgcaccgcaagattaatggtgctccgtgaaaatgttgattaattttattaggatcagtcgcaagtcttatttgttttcttagtaaagcttaccttattatggcacagtacattcgttcgctcgcggttgaggctgcagtcgaggctaccgggctgggaatgtgcgcatttacagaagctgatgctaatattgctacccttacacacaattctatcgatacgctacattaacccccttaaatacctcgaagcatctcctgaggttcggtcttattcttagacgtaatatggtctttgagaccccaaatgtatagttgaggttcgaggaggctcttactcctgaatgaagatgaacatatacgaaggattaattagacgacgaattccaatcgctccttaactctgaaataaatttcagagaacaattggtatcaccgctgtattatatagataagtattattgtgctttgcacgcagcatgccgtccgttttagtcagcttttccagacttcaccatagctctaaatcagactttggttactcagacttcgcaccaaaacagactttatgttcgcaaccgactactaaactgtcataatcaaaactgcccctttgcatttagatagaagtttctttggcctttggcttctggcctctgcggcgcctacactttcctcattcaacccgatcgcatacacgacgtgtcgcgcacaaggcccgaggccacgtcaaacttaggtagcacctctgcaaaataaggaccgtcatatgaatactatgaaggtcttcaacgccattcggatcgtcaagtgataggaacgcttcagacgttaaactattccttgggctcagtccttctgagcgattcgcacggatataattcacaacatagactcgccactggcgaagccgagctaatgtgggccacataaatttgtactagtataaagtattacccaaagtattaatacaatctgtattaatactgatacttgttttctatacgaaagtattgtataacagatatttataccggacctccagtagggccagtaatacttataccgtgatttggtcgattatcctaacctcagagtgagacgtgtagtcgttcatcttgaagctcttttaaatcacttacagtgagttcgtgttattgtgaaaagcacttacgtgttgggggcacactgctggtctcactgtttcaatgagctttttaaagctcattaatttaaaaattaatgtaatgtgagagcaaatgtgcataccggtggttgctgaatgtaatgtgactgaatttttcgccatgagttacaattttactgatatattggcttgctgaatgctcgagcacgatttagcctggtactgtgggggatatttagcgatgtccacccggaaatttgttgcaatcgattcagcggccaacggtggcaacgccaaagccacttataatgattcggaaagtgtttatttactactgtagcatggaaaccaggactaagcaaaagactatacgttgatttacggttgaaagaggtacgacggcactaccagatgcggcacgagatcccttgctgttacgtcaagcctctttcctgtcttcatttatggcggcggcggatgactaggacatgcaagttctagttgatcagcatgtgtgcaacgtcaggaacacgcgcgctgtctaccagtgctcgctgcgcttgctcgtggcatcggtccccgtgctgcctataccgttttccatattaaactccaagcccggtcattttaataaaatctgatgcaaacccggcacttcgtgcatatatttttgaaaccaatttggtaaaagtatgagtgtgtataggatacttgggggcggtgctgagaagctaagatacaacattttccgaagcaatgcccctctagcaaccggggcgaaaattcgccgtgaggatgctgctatactagtactgggatactgagtaggaagcaacattagtgctgctatcgcagaccaaatcggattaacggaaaagctaatttgtataccgcatactattgaattgaacacatcaattttagaaaggtatacaaataggagagggtatattactaccaacgtagattcgatgcatacaagttctggataattgttgcgagcagcctacgtaccgcaaaactactttgatgacgtcctgccaacttatatgccagtcttcaaaccatggagacacccataggttgcgccagagttggcccacaacgtctttcatggacagtgttaacccagcattcagaacttgaccaaaaccatttttcattaggtacctcaccgtaattttgcatgaagctccaaaactacaaacggcacccagacaattgccatttctaagataaaaacgacaggatcttgtttgccgtatccgacaaattaaatacttacactccgttcatttttttaaaaaagttaaaaactaaaaggagtgtaagtattaaaataaaggagtgtgagcatttgacgcgtgattttcaattttaaggcgtctcttagccaatcagaagatattaacattaacccaaactttgctgtttcaagaaaattagtactcgacgctctgtatggctgttgaggtatacaaattggcgtaggtacaataggtttgtatactgatcaaatcctatcagatttgagaggaggtattcaattcgagaagggtacgctatttggcgctatggtacgtcaagtcaaacaatgacccctcttgacatctaactggtacattttcttgagaccggtacgactccggtgccgcacgaggcaggtttgtggagtagcgcgctcacagaaaataagaaagttccgtaagttcgtcctcgcacaaaaccgacgcgtcctgatctcagtcgcgacgggcaatttcccggttcttgagtagcgtatcttcggctgcgagctcaagtcttcgcaggcttcagagtggggggggggttaagtggacgcttggtccttgtcttagggcgtcggtagttccttgggcctgcggacttatcgagccggcatttcctcggagatcccgtcgggcgtgcggcgttatcgggccggcgtttcctggggtttgttatcgggccgacgcggggtcttgtgcacagcggttatcaggccatgcggtccttcgtctaggctgcgcgttatcgagcgcctcctaaccggtattcgttttacgtgccttcgtttccaacacggggtttgagggggtgagcacccgagccagcgagcgaggggggccgcgtgttccttgcggctctgcttggcggcgctcggtggttctcaagaacctggctatctcccgaacgggagaggtctgaatggttcagaggattttcgggactgagtccttaccctatcctgtgtccttgctactggcaactccctactactgcttgctatgcctaccgttctgggcctatccctacttctgtcgtgcttgcactgccatccttcaacctggtttgcgtggcgtaatcaagatcttacctcggcggggtttagggtcggcgcgttttggtcggcgggttttgctcggcggggataagggtcggcgcgttttgcagagacggggtgctggtcgactcgtcggatgattacgcgtcgagttggactctggcgccgtgtatcacggcccatcacccgcgtcgacttttcccgtcgatccctgccgcgcgtcgcgttccaccaactgtatcgagttccatccttcgcaccgagttccatccttcgcgtcagtcggcttccatctcggcgcctcctctcaccggcgtcgacgtgcccccttcctcgcggggcactacaccacaaccgtcccgctgccacgcacgcttactacccaggtgggtgtgtcgttgcagaacctgccccgcgctgtggccgcatctccattcgttgcagtttttgtcgtcgccctccgcttcgtcgcctttcaagcatcatggttggcgctgaggacatctacgtcgaggagggcgggcccgacacctcgaggccgccgacatcgtcgtctatgcaagcagagcacataggtctcgcatccctgacccgtccgatcagctcgcggtcgactttcgaagaagtcgtcaatcgatttgacctgctctggcggcaggggccactgccgcgtgacacagtacttcgtgcccggcacgagatcaaactcgtgctggatgcccttgttctgcggaggctccgcagggatctccttcggaagtacgtccgcgtactcccgtaatatcttgtagtagggactcgtcttcaacgagtcccagctctgttcttcaaagcgctccttcttcgtcttcgcactgagagtgtcctcactcagtggtgctctccatgaagaactgaggcagttcttcattctccctcttcgttctctcggcgtccgagagaatgcatatttgctcggtgcgtccatcgtgtaagtcaagcgcgaagcgcttccagctcacggctggaagcaaagtcaactacgacgcttgtgtcggaggattagcgagaggcatctccctgtatcggaacccagcacaggtacgcgtcaagacgttcaacgtctcgacgtccggcttctctgtctccgtctgcccggctgacttctctgtctccgtctgtccggctgacgtctcggccccaggccgagacttgcgcagcgaccttcgcatgcgccgtcttcttgttttgcgtagcccggctccgcttggctcttgacctcgcctaggcccagccgtgggcgggtgttcttcttttattccgccggcgggtatatcccgcgggcgagcgacttcaagcccggctttgtcgctcggcatttcggaaatcgacacattttctccttcagccgtcggcggcgacgccgacgcttgctgctcttgcgcgcgtgctcgcgcgcgaccagggcattccgggacagcgccattaggcactgtcttgacgggagagtcgcgcgcacctatcggtgcgtgcattgcgacaacaggaccatcgctctctgttccgctatcgcgaccgaagcgcacaagagtgcgcatctcccagcctattacccgatcatgccgtgcaagccagggcatgccgtggctcaacacaatgtcaaacttctcgtccaggtccaggacgatgaagtgttcgacaaacactcgatgttcgtgcatgatgcgcaccatgcgcttctcggttttaacgatggcacccgttgccaatcgaatttccaacatacttcgaggtatgattacctcctcgaagtcaagccttgatatacttcgcagtcgaacaaagttgttcgacgcgcctaaatcaaccaaagcacgaagagagtgagttgctctctctcttcgaagacacgtccaagatgacaaggttcggtttgtcatcatgcattttgcagtgagaattgtcctcactggggggctgcagtcctcagtgtcgcatgtccgagttggacacgcgtgactgcttcaccggtaatccaccccacgcctacagggttccagcgttttttgtttgtcggcgacgatgcccggcatcgccgcatcgaccaccatctcggtgcacgggtgccgtgcactctcgggcatagtgaccgattcttccgcaacggaaacatcgtacattgctcccttgttgctgttgataaccagcagccgttgcattcgagaggtccattggtttcggccctcccgctatcgcgaccggaggcggttgcagcctcggcgcattcgcatgcagtttaacctgcctcagactaaactccccctgcatcgcaagagtaatcgcagcttcgagagtacctgggtactcacggaagagataggtcttcacaggcccatctctcagacccttcatcaacgtgacgaccttggtcgcctcgtctatcgggttggtcacgatgttcgagaccaagtaccgtgctctttgcgcgtaagcatggacatcatacttaccctgctgcaggtcgaggaactccgccctcgaccggaattcattttgcggaggctcaaacgctcgccttagcgcctccttgaaacccgcgtacgtgctgaagcacgtaggatccgagagtcggcgtccatacgcctaacttctcgctcgtccgccaagacatgacatggcaaacgcaaccttggacaacgggtcgacaatacgtcgagtcgcaatggcagtgtcgtgttcgacaagccaacggaagagaggctcgtcctctcttccgacatagttgctcacgtttagcttcaacgattgctcacgcggtgtcgtccccaacggcaccatggtagaggaagaagcatcacgctgctccttcatgatgaaccccagagcaacaccatgttgctttgtcggcgataacgtacgtagcatcgcagctactgccgcctccccaatgactgttgacagtcttagagtgcctcccactctggatccgacaggtggaggcaattatcgcgtacaacatgagttgcaggcgtagtggagctttcaatgggctcctccgtgctcatgaaaagtttatcggctcctcgttcgtacagctccgtacgaacgttcaggtagtcggtcgttggacggactacaaagtgctaccaggtgtaatgggcctactttggctcactactacgactcacacgtatgcgcacgtgtatgaggaagcgtaggtttcttttaattgacttaagtatactcgagatccacgagtatactttaaacaagataatgactctaagtagccgcttttggtaaagatgagaactgttattgtgatttatgctttgacttcccctaaatgaaatattttaaactaggaatctgccaacggctggttggcaggattcttctaacattcaagtcgctcattggctaaaagatgctgctttcatccaataggaatcctaaatatgtatgaaccacccgtcgtggtggtcccaaatgtctgaaccattggtgtaccttacaccaaggtcgagaaagcctttcgaacctctaacagacacgacgtctgttagagatacaagtggctgtagccacttgtgtgtgtaaccccgttacatgtctgcaatcacgggatggcgtgacctgacacggcgaccctccacagcaacccgacgcgagcacgacttcaagagcactatgagccttcaaagctcagctggacctcgaactcgaagtgtccaccgacgtccgccaaatccagccatgttcagcaaagtccagcaagctcaggctgaaccttctcggagtccagggaaaccgtcctcactgagccgtcagaggcttagccgacgcacatctggaccttcggaatttcgacaatgatgcagcacgggcttctcggcctcaggacacttcggctggacttagcaatgcagcaagcgcatccaagtggtacttcacacactccgagtacgcacgtagtcagcctcgctccttgctggcaccagtgatcagcgcatgacgtctggacttggcaacattccgcaagcacagcgctaacatcccatgacttcggtcgacttcagtagccgtttatctgagcctcgacaacttctgcacttgacatctgagcttggcgatcgtcgaccaacagcctccgcagttcagcttctgtcgtatccgtatcccacacgctcgacttcgaagttgctgttgggcacaagctccataccttaagggctccaccaggttttctatcaccgacgttgtccgggtgcaccatggctgagactgggttacggctttctagaccaagcatgtcaaagtcaggcgaccgacgaggttcgccaaaatctgagcggacttcgccacaaccgtctcgtgtgggtgttgagatcaaagagctttcttgcgagttggactcgatgctcacaacctgagaatgcctgcgacggcgccttcccactcactactccaaccctttcccaggtcgcaatcactgcatagtcccgcggtcaccactcaccagcgtttgacaatccatttccacttgtagaaatcgtaaaacaaaacaaacttgagcattcacacagagacgccacacatacacgattcccaacttagccacagctacgggtcttcagacaccggcagcgctttgaaatgtgcttgcgccttggcagccttgttgaactcatacagaagtgttccgcgattcagctgggacacaggcagtttcaagctcggtttcctttgggcatactaaagcacgttggggggtcagcagtcgttctggattattgaaggcgagccccatcaagctcacggagtgaatgcgagttggggctgcccccttagggagtggttgtggtgggtgtcgaagagtcgggtgtgtgccgccgggcgtgcggtcgagcgtgccgtggtggcgtgtcggggctgctggggccctgcgcccgacggtgcaaactcttgactggcccacaacgaactgctcaaactacactactgccacgttcggctggggacaaaacatgtaccggttgcccggtccaagaaaaccgcccgcttgaacggcatactaaacctactggtgaccgcgcgcggcttggtgtgcgtgtgcatcttggtgtccacgtgtgtcttggtgtccgcgtgcggctcgccgtccacggccacctcgtccttcttcaacgtggctttatccttccatcggaaaacataatttccccgctacactcggaaatacaccagtatccctcggtactcccggactcttttggaagtccgagtccgtttgaccccgcgaacatcacggatggtctcgacctcatactcgttctgagcctcatctgggccatccaaatcttctggtaataacgcagcatcgaaatcatcttcttcggcgacttctacatcttcagttggtcggtctgggaacagggcacgcggtttgagtctactgatgtggacccaagcgtgcaatttgtagcccgttccctcgcttttcaacttgcaccggaaatcatctgaaacctacatgatacggaatggtccatgccaaagatcagcgaacttcttcgtcaacccagcttggactctcgccaggtacagccataccgcgtccccgacttggaaacccgtcttgggcctctcggacagatcttgccacgccttggtctgagcttccgaacgtttcgacttagcctgagcttgaaggtccttggcccaaccctgagcatactcgtactgccgttgaacgctgcgacaccactcataaacggtattttggtcgaggccgacaggctgaggtccaagcatggcggagactgtacttcgagggtcccagccgtgaaccagataaaacggaatgtcgagacgggtagcgtcgaaggacgtgttcaatgtccaaggccccgcatttggcactatcgacgccgtgcgacaatggaatcgcaagccgatcgcaagtttggagcgctgaacccaaggtatacccaagacaagccatgtgaccccaatcatagtgaacagaaggtatttggtcgaagaagaatgcagaagagaaagaagtaagagagagaaaagtagctgataaaagacaaacagagttcaattttccctgtactgcgcaagtgacttcggccaagcatgccgacggaaatccggaggacccgagactacgaccgcgggacgctaagggcacatcaacggcgaaggacagccgtctgtgtggactccatcaactcaagtccagttaggtggtgaccagcgacggccttgagcttcgtggggtgatccatctattccatatcctggttgggccacttgctgtgctcgtggtagcccatttcatattattccagagggtattctggggtgctaggtagtcacctccaggattttgtattgactgcttgtgtgaagggaaggtaactgatagtgattgtattttcctcctttattggaggtggtgtgcgtttgtgtgagtctcaggggagctaggcccctgaatttcagactcgaatgagcctagtgtgagtttgacccatcgtccatgggtccaaaagaataagtgacggctagttgtagagtttgtatattctgtatttgttgtttttatcgagcttgaagggcatttgggtagagttccacgtcccagagtggactgaaatcctggactctgaattcgtggtattctggatttcaggggatctgattctctgggcttgcctttggtgtggaggtgcgttctggattagatgtgcactcccgcacttcttcgaggctacatttacaaccggtggagtgccgttccgtcgaacacaaacgagccggcagggattacacaaggtacccacgccaaccaagaggagtgattttcagggtttaaagcttcgcgactgcgaatctctgggtctaacttcttgctgttgactctgaagtcgattcgctgggtctacaccttgaggaacagtcttgggctgcgctatacgaacccccctgggcgataaaggtttcatcggcctcgccacatgcgctggatgatgaacgtgcagcggaatcggctggtgcgagtctgcagggcgaaaaccaaggacatgccgacgccggcagcgcgtggtggtactttgaaactgccctaaactcacatgtgactgggagacgttcttacttcgtttcgttcacagaggacacctggtgtttgaggcttgtcgccaagcattgtcgcgcgtatggctggagtgggcacaatcgcgctagtaaatgaggtcgacggcgagcaagttgtcatgtatgtggacgacatcttctacgtaccagatgctgagtatggtctatcctcgccaggcttgaaggcttcgagtttggttttgatccagcgactcggaacttcatgattttcagagaagggcgacgtgtggccgtggcgacaccccaagaagcgacttgggggttccaggtcactcacccgtctcgcggcgacttcgtagggcctgagaatcacccgttgtgcaactacacggtggcggaacgggtcggcactctgcagctctggcacgagtgactgtgccatacttgcccacagtatctcaagacgatggtcatcaaggagctggtgcgcggcagcaggacacgtgtgacgcgtgccacttgggcaagcagaagaagaagaagcaccccaacaaaattggatcgagcgaccaaagagtcgaatcaggtgatctatgcagacttacgcttcccaagcaaggcgaatgggactcggtacgaggccatcctggtgataatggacgggtactcaccttttgtcacggtgcatctgctgaaaagcaatgcaagcgaggtcgtgaacaagcatctcaaagagtacgtgttctgggcggagcggcaagctggacgactcgtgaagaaggtgctcacgcacacggtgaagccggttctcacggataagggcggcgagtttgtttacgaggcaatggaggcggcgacgtgcggttcgtcagtggtagaagacgagctcgaagacgctgagattgaagctgattctgatgaggaggagattactctggcgagtgtttttgcctcagacgaaaatgaggtagacgcaaatgtgtctagcacttccgggctggaggaggataatggtgagctcaagatggcagattctacgggcttgcgccgcgtgagcgaaggtggaagcggccaagaggaagtagcgatgcaagtatgatgttctcaccggctccagcccagacacggaagtgcacgcatcatgacgagactccgtccgaggacgaacgcgtcgagcatggcgccgcaaagcctgaagtgaaaaagactcgcacggggcttcacgagtgccaggagcgccggctacctcgatatctggacgactacgtgccgaatctcacgccgaacaacgctcgtgtgctggacaagaacggctggccagtgaagtcaaaatccctcgcaatcgcagagagatgatgcgctcgaagtagcgggatatcttcctgatgggagaaatggaggagataactgcactcaaagccaaaggtgtcattatgaagattcctggagatgaagttcctgcggacgctcagcctatgaacaccatgtgggtgtacgctctgaaatcggacccttttggctacgtggttcgattcaaggcgcgcattgtagctctggggaattaccagcgccctggtatcgattatcgcgagacctttgcaccagtggtgaggatgtcctctctcagactgctaatgacgattgctgcaaagctgaggctagtaatgtacggtggagatatcaatacggcgtatttgaacgcgtggctggctatacggcagtacctgcgctccatcgacggatacccgtgcaaggtgaatggtcacatgtacgtggtgctcaaggcgctgtacggattgcatcagtcgggtcgtgagtggaattccgagctcaaccagtggttcctcgatcgataccggcgatcgctcacggagccgtgcctgtactaccgctttgaaggagagaccattgcgtacgtgctcgtctatgttgacgacattttagttgcgactaatcatgagcagttcaagtccaagctgtttcgaagacctgaacgacgcatacgggctgaaaggccaaggactgctgtcacaatatgtaggagtggaggtgcagcagacacacgagagtatcactatttcacagggcaattacgcggagaaattctggagaaattcgggtacctggaggcacacgctgtatgaaaccctaaggaggtaaacgtgagactggccccgctggacgaaaacgaggcaacggactcaagcttcccgtatcgtgacgcactcgggatgctaatgtatctagcgaccagcacgagacaagatttggcctttgtgttggggcagctaatccgattcgtcgcaaactcggcggtgaagcacgtggttgcactgaaacgagtgctccgttatcttgctggcacgcaggactacgggattacctacgcaagacagcagagcagtgtgcatgaagtggagctcgagggattcagcaacagcgactgggcgaacgaccctgagcagtggaagagcacgaccggctttgtgttcccacttgctggaggcgctgttacgtggatgtctcgtccacaatcgataatcgctttgacgactgctgaagcggaatatgtagctgcgtgcgaggcgactatggaagcagtggcggcaagcaacgttctgcaggagatcttgcccagttgcgctgtcaagctgcggatcggaatcgacaaccaagctgcacatgtgatggctacaaatccaacatacagtcgccgcacgcgtcatattgagctccgctggcactttgttcgggagcaggtgcaaaaggggggcatcgagctgcacaaagtgacgggcgaagataatcctgcagaaaaggcatctgcctttacaaaggcgctggacaagaagcgtctgaaggatttgctgctgctcatgggcattgcaggtgccaagtagttgaagagcgaacttcgatgtggaagagcgatcttcgatgggggcgtgttggaatgcatattcaagttgaggacctggttcaacggaggttgagaagagagctgagatgcaggagagaccaggtcgtagtatgagaacgggcttgaacccgttagtactcgaggtgggggctgctaacaccaaaagctaattcagtcttcattttatctacaaggtagcacttgttatggctccgcaacagaggggacttgcttagagtaaatcgcttatctctgacggtgttggtttcggttatttggtgcgatgtgtattagtagtagtgcacgatgctgttgaagtgagcttagcagcaacccgtctagctagacggacgagaccagcaaggtgatgatgacaaagaggtatgcgtgatatggagtcggacacgtctaagtgctcgccgtccgcacacgggcatgctggcgctgcttggagaacctgagcgcgagctacactctgcgccgtaggcaggcaagctaacctgtttgtcaagcgacagcgtgtctaagatgctgccaaccaccggcatgccagtgtcccagctgccgttgggaatgcaacttaaaacaccaattgaatgcacggtttcaatttattgcacgatatgcattattaaccaatgcaatcgatctattcgacattgtgatattttgattggcctaaaagccgataatcaaatttgtgcgcgacagttttagtatggaacagcttccaacaagggcctctaaaagtttggcggtaagtattcagcaatgactctggagggtgtccgtgtgctttatcacaatcacaaagcggcgagaaagacatacatgtcttaacaggcacctgtgctatcaacaagtacatgcccatactgaaaccaaaattaattatgaattgtgcactaaaatgatcactggcttttattgctccttgtgccgctacacttgcacttatagctttgcaaggacggtttatcttacagttaggaatatgctcctggtattgttccttattctgtaatacgccatgacccgaatagcttcctctcaaccatccttgtgctgtcgtaggcaaattccgaaatgacccaaaatcgcgcacttaattggttttttaagttacttggacgagtccatcatggcacgtcctggtggcagtcttggcacagcgtacgcggttggttaagtctgccggctgcgcaggtcgctgctcatgagctgctcgaacaccatgggaggcaggaacaggtcgctttggctgagcatagccgtcaacacttgccgagcttgtaccccgcacattgagtcttattgctcgctgttgcgtgtcgcttcgtaatgaaccaagtcggggtcgcacaggaaatagccgctgccgatcgccactttaatgtaggtcgtgctaatgaccaataataaattgaggtgctttgtgtaacttaatgcgcaaacattgtagccgttgtagtcgctttagttactggataacactaaaaatatacttacgcaacatcctcgacaaaaagccaataatggttttgcaatcgtttgcatctttacctgtacagtactcggaagtggctaaacggcaggcggtcatagttgcttgtttgctgtgggatcgggcttattttcgagggtccatggatgttcatcgaggaatgttgcaaaaagtacgacaatcgaggaaagccgctaaaaacggatttccggcgaggaatcaccgcggggtccacgggtggagccattttaacagtaaaatgctacatagcggtgtcaatacgtttgcttcgcgttgcccattgtctctccgtgttactcctgcattacccttgccaacaccgactgcccgcaagctgtccgttgtctgtgctactgcgcagcacttctgcccgtgcatgacgcatgcggaggctgttgctgctgggacaacaggctggccaataacatctgctcgccgctgcggtaacaccgagccacatacctgtgggtgtcgcatctacctatcgtgaagcaggtaggttattatatgttacagtgcgcgccaaaacgctgtcatgcgttcgcatcgccagtctcgtgaacgttcctagtcagcttcggtcctccactggacgacgtggagacaatgctgcctccaagcacagcatgaggcttctgacggtaatgtgaactcgcacccattgtccacccaaaacacgccccccagtaattttgttgctattgatgcagtcataacaatacatgcagaacacgctacatagcggtatatgagcatgtatgaaccagacccacagatcggagtatgtgtctgaccgctgttctcgctgcacccaaattgtttctccttatgatacttgcgcaactataatcgacttgtcttccttcctttcgtaataactgcgcattaataccgccgcagcgtacggtagtctcgagaagctaggttacaccatccactacagccgcccacagtgataggtgtgtacaagaattcaaaacgtaagacattctagtaaactctggcgtcaaacgtggcaatggcagcggtgattcctctaagtgtgataaatggcaccgtaaattgcaatgctctacatatgaagaggaggccgatccagttcgtacatctattataggcgtattaccagttcaattgagtggccattgcattaagataccattcatcacactgaaatatagcaatacagctcggtgtatcgattcacgacaataacttgccttgtaactttaaaattcaaaacccgaaaattcaacctttcaaaatgccactcttatctgaacatttcgcgcacgaaaatccgcgcgtattcgccactgacgaggtcggcgaatccaagcggcaccctttcaacagctgttcgacggtggcgcccgtaccccaaagcgccggaatagtagcaagcgacgacggtcggaatcgttcgactcgtcgtcttcagaagaagaaggtgggttgtttggaacgacaaaggacacaaaacctatagcgcggccacagggctttcgcttaccgccgatggacaaggcgatggcgaagcagtcgaagtcgctcgagtcgaagaagagatcatgctagtggctacagcgtaggtaacctcacaattttcaataaaacatccattatttctttacacccctacaatacgtattccagtacttatcctcgccaaggtgctgatacaggtatattcagtttagtaaccctattcacgcatgattgtatactgtacgcgtggtcgtgccggatttcgggtaccgcatcgcccctgtcctaagcgaagttttctcctaagcgaacttttattttagccaataggagtgtccgattttcagcagatgatcggggctaaaataccgaatcaagctcgctaattatagaccattaatcacgtcgtggttcagataactggctaagggtgagagtacagtatgtcggtagctactagagcgcattatcgaaagcgcgatgggaaggcctcgcaccactgggactgggaaaagaccgaagagatactctcgtattgctgtcgactacgcccacaagcgcctcgtcctctcgactttctagctgctgggaacaaagtaaacgaggtaattgatcacttttatccgccttgcagtgctgatgacagaacacgtaagcaaaagcagatctctaaatggaaacaacaagaggctcacatcgcctcgatatgcaatgacggcaaagggcatcgtaagaacttgcgtagcagcggtcaagcaacggtgctgtctagtgaagctgaggacgccattgttctctggatgagcacgatgcgcaaagaaggctgcccggtcacctctcagatgctgcggtgcaaggcactcgaggttgctgccgacgaaggactcgctccggaaaagttcaaagcgtcgcattcacggcgtcggcgcttcatgcgacggcataaacgctcgatccgtacccgaacgcgacaggggcaaacgacacccgaagatgctgaagctgccaaggccaagttcattgccgacgtccgggcggctataatcgaacacgggatcacaaccgtgtacaacgtggaccagacaggtgaggagctgtcctaaggtgttattctgtccgcatctaactcttagcgtttatgcgtgctgtagctgtagttttttagtatccccctcgcaaaacgatcactaagcgcggagagaaaacggtgtgggttaagtgcagcgggaaggacgaggagcgagctaccgcaatgctgctaggagactggcacgggaataaatacgccccgtttatcgcattcaagaatggggtctcacgtcatgatcacgtgcaagccgtcaatgatgccgcgcgtcatggatttggtgtgcgtttgcggaaggaggtctttgtgctacaagcccgacacggctgctgtatctacggcaatgctacagcgtggtggaactcccatatctcgctcgagtttcttcgttaccattttggatatcgagagaacatggacgagaagctgcttctgctctgggatgaattctcgggtcaatggacccaggtggttgactacgcgaagtctatcaatgtagtcctcatgaaagtgccgccgcgctacacgtacgtatgtcagccagccgacattgcctggaaccatcctttcaaaagccgacttcgagggcgctgggaggattgtcttcgcgcccagatcgctgagcaccatgcacaagagcgtagccagacactggagcggcgaagattatccgagcaagtggcagcgatagccagggaagagatgcaagaggtggcgagggagcagatcgcaagcattcaggatcagatgcctagctctgccttcgaaatggttgcgtccaagcggactgtcatcacgtcgtggattgcagagagctgggacgagcttagctctcagacaatcgtcggagggtttgctaaggctggtctccttggtgatacgcgcacctgtcaagccgaagacgagacaaacggtatcgagaccatcactgatatgctggaccaattgagcttgctcggcgttacaggaaaggcagtcagatcggacgactaatacgccagcagtgatagttcagacgacgagttttaacctgacttaatacatcgatgtttttgcccttgatgcaattgcgaaggtaatcaagcgagcttggacttgtagctcaattggcaagagcaccgcgatttgagcggatggacgcgggttcaattcccggcgtgtccatattttttgcctcaattaaatacgaaaataattcgtacctttttgggcactaattcgtgagtcaagaaattaaccctaacatttagaacgcacattgacgttcgcttaggacaggggcgatacggtatctatcagcctcgcgcaagcctggcaacagtcaccaatacctaaggacgcccgcgtctgctgacgtgacttagtgcttgcagttctgctgcctgtgaagtaacgtcacgctgggcacgccatggtgagggtgactggtattaacaagcgtactgtgctacagggcaggccggcagctcaagcgttcgacaagatcatgaagaaacgcaagaatcgacctgcagccaagtcgcgcaacatgaagaaggccagggcggcgcgccgcgctgcggctgatgcgacggctgtcctgtcatctcaaggaaggtctaagggtacagccgcgggggccgccgaggtggaggtgcagcaggccattgagccgctgcagccggcacgtggtgtcacagaagtgagtgccgtcgttagtgacaccgatcagactgctgccaccaaccagactgatcctggcacagacctgtcagagcaggagccgaatgtggactggctgtgcttgatctgcaccttcatgaacggcgaggcttcagcatactgcacaaacggcaagtgtggcagaccagctgctgtagtcgacgatgaagacccagaaactgtttgggacgcgatgtcagtggcgcaactggctgatgacaccgaccacatgactgttgccacagtcagcggggctactgacacaaaccgtacaacagctgccacagtccaaaaggctactcgcacagtccgcaagtctactcccatcgaccaaatgttccatcccatctatgacgagtactacaaggagagtgatctcactgtggatgcggagtatgcaactaccactgagaagtggcaagtggcttacatcaatgatcggcggcagacgcctctagggctgcagtaccatgtactctgggtgcatcctgatcgtagttgcagaaagctcaaccggcacaggtgaaattgaccgcttcaaagcgcgtcttgttatcaaaggcttcctacaggaacatggcattgactataacgagatattctctcctgttatcagaatggaagtactcagactcctcctcaccattgcagccctgctagatcttgaaatccaccagatggacgtaaaaacggcattcatcaacggctttctcgaggaggaaatctacatggctcaaccggaaggttttcagatcccgggcaaggagcacctcgtgtgtaaactcctggagagtctgtacgggttgaaacaagctccccgtgtctggtacaaaacattatctgccttcctagagagtctggggtcccacaaactcattaaggacagctgtgtatttaaacgcacagttaacggtgtgacttgccacatcgcagtctatgtggacgaccttttgattattgcacctactcgtggacgaactgaaatccgccctgaaaaagcgattctccatgacagatttaggggtggtgaagtaccaaatcggctggtctattcaacgtgaccgtaagaaccgaacgatattcatccaccagcataagtacgctacgaaggtccttgacagattcagcgactacattccgtatcctattgcaactccagcaaaacggaacactaaactctctattatcagccagcctagcagtgaagctgaaaaaggtacgatgaaagatattccgtatcgcgaagccgttggtagtatcaccaatctcatggtagacactcgacctgatatggcattctacatgcgcgaagtcagccagttcctagccaatccgggaatggggcactggaaagctatcgtcagaggtttcaagtacctatccggtacaaaagactatggccttctccttggagggtcactcgatatgacaccggagaacctagccgacaacttaacagcattcagtgactctgactatgcaaactgccctgatacgagacgttctgtgggtagttatgttactatgctagccggcagtccaatctcatggctctcgcgcaagcaccacacagtagtattgtccacaacggaggctgcggacattgccttatgccactgcatgcaagagatgatattcctcaaactcccccttcaagaacttggctttgatacaacacaaggcaacgttatccatgaggacaatcagagctatactaaaatctgatacaaccccgacattcacggaatatcaaagcacatatacatatgattctgttttgtgcaagagaaagctgagcgacacgagttcaccgtcacttattgtaaaacgaaaaagatggtggctgacatctttacaaaagctttagacaagcaccagttcagagaactaagggccaacctcaggttacactccatggaagctttatccggctagtcagtatagtaagacaacgataatataattgcatgaagcgtgcctatctattgcgttcctttagtttttttttcactgggttttatcatttgttcgcacaaggttttccctcgttgaggttttcctggtcaagtaccgaattacctaggcgcacgatttaatacattagagtccatgcacagaaacattttttattttatttttgctgggaaagtccattgtcattgaggcaaacccgcggaaatcctaccgactccgatcgtcatcttctagttgatgatgacgaaaggacgggtcttgccttaaacggtcagcacgagtccatggccgacgaagctgtggttgtaggctgcgctgatgtagatcccgtcggtgagctcgatttccgccaacatgcgtgccccgcgacgtcctggaacaacgtagttgtaattcgcgatcgcgttgtagatgaagtcgcggcctgcatctcgaagtcgacgaagaaaacggaggacgatcttccactttgtacctttggacaggtcacgctggtagagcaccagctcgtcgtggacaagctggtcaatgtcttgttgcgtgacgacatccggacggcctactagctccgctggtcgcttgagcgcgttgaagatgcagagaccttccgtgtccgcacccagcaagtatttgccgacatcatccatcttccagaacgcttcgaaatcctcgacgtcggatgctttccagcgatcgacgatggccatttcatccacgaagtcatcctcagccagcttagcgcgcggctcccacgtgcggagatatactatacaacaaagacccatcggcttgtgagaatcttccgtcctttcgggcggggtactagcacccaagtgttgttctccattagggatttatattctgatttggctgctttgcgctatcgcttagcatgagcggtctgcattgccactcgatacgtaggcggctctgtcacataccgaatagctagtaatgtgtacagtagttgtctacgcctttcctgatcctgctgatcttcctcagagttgaggttggcttcctcgtggtcttttctgagacgggaccgcttacgcgccggtggtaaggaagattcggacttggtctctgttcgtaaggagtaatatatttcatcccgattaagagcccccccccctgcgcgattgtagggtgtgaggaatggcagcagtaggtgtatcagggccagcaggagcgggtgccggatctgcagtaggagtcgttgcaggtacaggtttgcaggagtagtcattgcaggtgcgggacccggtatggtggcacgttggtccttttacaaagctggactgtgctcagggttgagcgtcaagtccgccagaggggggaactcatcctccttaaatacgacatcacgactatagacaatagcgtgtgtgttgatatccatcaggcgataccctttcttgtggtccggtatgccaaggtacatgcacagtcgtgctcgagggtcaagcttgtcacgatactgctccgtgatatgcacgtatgcactacatccgaataccttcatgtaggtcatggatgggatacgacggtaccaaagctcatacggggtccggccatccgttttggagctgggcgtcatattattcagtgtagtaacatgacacacacattcagcccacaaactgttttggaagcttcccgtcaagcagtagtgcacgcactcgctccatgattgtgcgcatgcggcgttccgcaacaccattttgctgaggtgtgtatgcgttggtaaactgtgcatgagtaccgtacttcttgaagatccgacggccaaacttttcatactctttcgcattacctgcttggagccgttgaatatcatgatcttctataagagtccgagtgtgttgcaggacatggatgtcccgcctgaagatattcagggtttttctccgaaagtcctcgtagcactcattcagctcactacggttcgtgatacatgaatcgagaaaagtcatcgataaagataaaaaatagcgacagtcagtaagactaggcacaggtaatggaccacagatatctgagtgcaccttttccaaaggagatgtagcacggtaaacaactctattagaatagaatggggcgcggtgtgactttgctaacgtgcaggctacacagaagaactgatccgtaggatctacaaccacagaatcatcgagtccatcaatggcttggctcctagataggtcatgcaaaatgcgaacgttaggatgtccaaggcgtttgtgcataagcagtaggaatctttgcttacttttggccatgagggccgtagcattggcctttggctgagcctggaactggtacaggtccgtgttggtcgccatgagcgccttgagcttaaagcgctggtcggtctgcacagcacagtgtttgtggtcaaagttgaagcggtagtcgtgcttcactgcggctgggaccgatagcaggttgaagtgcaactgcggtgcgtacaggacaccatgaagggtgagcgtcttcgagttgcctttggagtcaacgacttccagctcaacttgtccaattccttcgattggaatctggttattgccgccaactgtgatgaagccaccactcgttgcgatgtcggcaaaccactgggatccgtgcgtcacgtggcgcgtgcatccagagtcaatagtccaggtagggtcaagttgaacgttggcttgggcggccaggctgatgggagggttgaccgtcgtagcaactgcaatcaaaccggtatcgcggcgctgtttgtggaacaccttgcgcttggcaccatcatcgccatcgtcatccgagtcggagtcgagaggacggttcttgccttggtcagtattgcgattcttgccaccgttgccatcatgcttgtgcttgcggctaccgtggtgcttgtctctgcgaccgttcccgttgttgttgctgttgttgctgcgtccttggtgctggctccagctcttggaattgcgatacggatggtcgcgcttcgagttgcccttgaaagcgaagttcgcaggcagtaccgtgcctcactcgtccgtctcgcaggtccttttgtagtccgcggcattgacgaatgttatggcatggacggtcacagtaagagcaattgcagttcccgttgcgatctagggcacgctcgttcttggtgtcgctggtctcaggtattcccttagacagcgtataccgctcttgagtctggatgtcacggaccttgccctcgatgctctggttcaagtcttcgtacgggatatacttccgttggcctttccagatgcggaggtcattcttccttgacttgggcatggagtgaaacaggtaggtcgacttctgcgactctgccatcaccgtgtcggtggcttcttgcgcggctttcatcgcgttctccagcttcaagaagaatttagtcaggtctgagccctcctcatacctgatttccatcaagtagtgctggatgaagtaggggtcgccgtggaatacagcaccctcatacttatggcaaatgaactgggagatctcgtaggatgtcgtgaggttcttcaccagtcggacatgggtgttgtccatggttttcatcaagaacgctttggtcttggcttcttgctgacgtcgctcacgcgggttcagaggctgagacttctctttggcaccgcgcttgccttggctgcggctgaatggtcgaattaccagcagcttcttgcgcttggaggaggagtccgagttgtctccggagtcttcatcagagtcggaccgttgcttgtcatcttcgctctcctcgtcgtagtccatcgcgtccgagtcgacgtcgactctctccgacggcttggtcttcgttgcatcgtcggagtcggacatgtcgctctcgctcttatcgtttccttcctcccacgccatcgtagtcgggtttctgtacgtagccgagtagatgcttgccgttgagggccacgcacacgcgagtcttccacacatcgaagttttcggcgccgatgaggcgcgggaagtcgtcgcttgaggcttggcttgggctcataacctctgaatgcgaaggtagagagcgtagggagcgtagagaagaagatacaagtgtgtaggaggcgtcaaaagacgaagtaagtgtattagcgaggagagcatcagccagagcgcagtagatggctggtgcagagcatattactgtgtatatctgtataccatactaaatacgaaaataacagctataagagggtctgagatcactggctatcagctttgaggtacagtgtaccagaggttaaagaggctaccgcaaaaaccggatagatgcagcactcgcaaaattgcagcactccgtatcggttgtatagaaaacagtagccaatcagcgttaacggagagttacctgtcccatcacctcatctcgttttgaacgaatcgtcaaaagtggatagacttgaaatttgtattcaaagagttaccgtactagtttgattaagtacgtttgcacgagatctcaaccgtgaagtggagggccgtactggacgaatggccccgccttgtgaaacgagttgcgcactgtgtcttcggtgatcctctcccagcccgatatcccgcggcagtacatgccgtatcgacgctcacccggtgttatcttgcggggtcttccagctggacggttcgagtagcccttgcgaatgtgctgtttcaacggcgccatgacgccaacatccagcggctgggtcacccccgtgcagccaccgggcacgaactgcacggccgtcccagtgcacgccagtgcatcgagctcttccgccatcttgtgaaccttcaaactatctaaggtcagtagcgatggctccgtcacgataggcttccaagcgttttcgatccagtcgagcatgactcgaagatcgaaccacgcctttgcctggaccgaaaacgtggcgacttcctcctcgcagtaacttctgacctccctctcgacgtcacccttggaacacaaaatgcggggggaacttgcgcccatcggccgcaacagtcacggccatggtgcagcggtagctgtcgcttccttccgtcagcgttggcacgcgcgtagccccaaccacctccaccgtagttcgtgaggccatgtactgtaaatggacgtttggtccatattgaaaatggttcgtttaggcgcgaggcccaggcgggggtcgctcctgggcgactttcagcacctccgagacaaacgagagccttgcttcttctagatcgcttcttgtctttcgtccagagtgggtgatgcggcgaatcgttaggccgttgcgacgcatgaagcgcgcgcaccactgcagctgcgcgtcgacgcttttgctctccatgaacgccggcgccagctccgttgcctttgcgattatcatgtcgcgcgtcaccacttgttcctcccgcctcgcgtccttgatgaaggtcacaacggcgtcttcgacaggcgcggacggtgagactcggccgctgcctccaagtgtcagcctgtttgcgcgagacgggtgggctgttcctcggcgctccgacacagcgatcagcttatcgagcttccgctgccatgtttgcagcgttgagcgtttgacatcgcgtagcgtgcaaaacgcttttctggtcatgccgtccttggcggcggcgatgtagtcgagcacgagttgcagcttgaaagcgttggtgtaggacagaggaattcgttccctgggcattgtggaggtcgcgtggggtgaagtggcttcgagagttggttgattctgaaatgccacgcgtccagcagtgacggctgtcgagcatcgcctgctctcaagttcaaccgtaaagtgatccgtaatctaaacttggtaccgtgttttgatcacatctggttctacttgaatttactgcacctatcggaaaaatgcagcaccatacattgtcttatagtaaaatggtgctgcatttatccggtttttgcggtacttcaacaatacggtaaccacgagcgtgcatactagtttacatgttttgagcgcgaattatgaaatatagcaatacacattctgaaatatagcgatacgtctcagaatattaatttatgacaataacaattccgtataacttcaaacttcaaaatcgcaatattcaacatttgaaaatgccgcggagtcgcagccgcagcggctccctcgacagcttgggccggcgccggcgccgtgacgcgccctccagcagccgcagacgccgccgctccgtgtctgcgtcgcgctctccttcgcgttctcgctctcgctctccgtcgcgcagccgccgccgggaccgccgcagtcgcagtaggagtcgccgacgcagccgcagtcgcagcgtagaacggcgccgccgccgtcgctcctacagccgcagtaggagccgcagcaggtcgcgcgggcggcgttctacctcccgctctacgtctcgaaggacgaatgatgccgaaaggtagaacgattctacaatatttgcccaaaaatggcagagtgggaaaagtaacattaacgtgttctacctgctttgtgctatgcaggccgaaggagaacgtgcagcagcccaagcccgagcagaaggaggaggaggaggtgaacacgatgtcccacctgagtgaggaagagcagatgcagctgctgctcggcttcgggggcttcgactccaccaagggcaaagtggtggaggagaacctcaagagcgcggccgtgggcaccgcaaggcgcgagaacaagcgcgagtaccgccagtacatgaaccgccgcggcggcttcaaccgcccactcgacaagtcctgaggtgggttgggcaggtggtgggtctcggactttgctgaagctaaaacgctgtggctctgacctgtggctgcagaatatcagccagctgactgatgcaataaagggcctccaagttagacacttgaccttgttagtgctcaagggtcttcttgctgttgtttctacctaactgttgatgttttggtgatttagtgggctctgtgttcagcgcctcgagttgcctttgccgcgttgacccacagccgcctgccgcttgcccccgcgtttagcgagtctggcagcgtacgcgactttggcgtccgcgcgacgttgagcttcttccgcgcaacgccgtcgctcgtcttcaaggcggagctcctcgctcacgaaccagcgcatccactcgtcctcgtacttcatggacatccgctcgtcgacctcgcgctggtgctccaggcgcctcctctcggcttcgcgcgcgatttctcgctcgatgtggcgttgctgggtctcctccatttccatctgcaggttcgcgcggatctcgcgtttgaagtcgcgagctcgggccaggaacgcgcgacttcgggcgctgatctcttcgaatggggcgcgaccttgtttccgctccacttgaagcgcctcgatgtgtgcctcgcagtcgagtcgaaaacgttcggccggtggcaaacgcttagtagtggtggctgagctcttgttactaccggctttcttttttgctgtagcggcggcgagagcttcagcgtgaatgtccaagacttcaggccgtcgagcaagaccggatgcagcctcgatattgaaggcacgaagcaacgcggcgtcgtcaacggcgcaggcggcttgttcagcctcccaggcctgaagatactcactctcgagcgtcgtaacagcagtgacgtcgcgttggatcgggtagtgggacacaacgtggcgcaagtctgcaatcgccgacggtagttgtccaaggccgcgatatgcttcagctcgacgcaagaagagctgcacgcttgcttcggggatggttggtaagtgggctgcttcatcttcggcgatggcttcctgctggttgtctgtgggttcgagggttggaagtggagcatggacacacttgagcgcccttgtcaagctatcgacggcatcaggatattgatggagcaccatgtggacgagccctttgaggtaataagtggttgcgagctctgggcactcgaactctatcgccacttggaagtctttcgatgctccactgccgagacgttcgtggtcttgtctggcttgcaagcgcttgttcgcagccttcgtgtaagtttctttgaccgaatcttcaggctggaactcgttgctgttgtccgagtggagctttggcgattccggttgctggtcgtgcgctttcttctgcttcgacttcagtcgcagttgacgagcgcgaaggagctcagccccgtgcatttcctgctcgcaagcgctaatcacagtagagacttcgtcgatcgcttgtctcgctcgcttgagctgtggcatacaacacacaccacaagtccatcagaatccacaatgcacgcacgcaagtcaagtggatgcttacaagcatgaagcggcacactccacgtctgtagtggagttgagagctctcgtggttttggtcaacatgaggaagggccttcacttcgtctatcagcgttgacaagagctcttctgctttgtcaaagtccccagcgtcaatcagtttagaggcacgagcgaggcgacttcggcggtcctgctgatgctgatgctgcagagcagtgaacgggttgttggaaaactcgcagaagcaattcacacgggaaattgcgggcgggagaccagacagcaagttgtcgctggcatacagcgactgcaagtgcgtcagctccatcacggacgttggcaaggagcggagctggttgaaggacacattcaactttatcaactgcgataggttcccgacgcgcagaggcagcttctccaactggttgtggtcgcacgtgagctctcgcaggcgaggaagctgcgtcagttcgtcaggcagctcctgcaactcgttcgtgctgaggtacaagaccttaagcctgcgcaggtgggcgatttcagtggggagaacgcgcagcgagttgttcgagaggtccaagtgctgcaggtggctgcagtacagtaacacagccagtggcacttgtgagaggtggttgccagccagcacgagctcttgaagcgtgtcttgcatcgctgcgtggccgatgagcagcgggaactcgagcagcgcgttctgtcgcagtcggagcgtccgaacgggcgagtctttgaggaagtccaacgactcgaacgtgacgatgccgcacgacgacgcagaaaagaacgagacgctcgacaagtgcccgaaaaagtccttgaggttgatgagcttcgggttgttgtcgaggttgaggtggcgcagttggctcagcgcgccgaactctttgggcagcagtctcagctggttggagaagaggagaagcatttcgagcttgtgcagggccccgatgctttctgggagagttagcagtcggttatgagcgagatcaaactcctccaagcaggagaggttgccaatggcttctggtaacgagcgcagagcattgtgatgcagcaccagtcgtttcagcgaggcgagtgctgggatctcgtctcttaatgcggtgagttgattgttggacaagtccaagagcgtgagctcgctgcacttttcgatggacttgggcacttccacgagccgattgtcattcagaagcagcacttcaagcctcgccaacaagcccacgccgacctgccactccctcgtttctcggagcagcttcaagtctccttccacgtacggcagctccttgagtcgattgtgcgagaggtcgaggtagcggatctcgcgaagtttccagagcttgggggagaatgcttggatgaagttgtgcgacgctcggatctctgtgagcgtcgtcgttgtctgcaggcaggacgggagacgcgtgagctggttgtggctcacgtcgagctcctcgaggtggatcaagtcctggattccggacgggatgcgcgtcaagcagttgtgcgacaagaccaatttcttgaggaactgcaggttccagatgcgagaggagagcttccacgcgtccaggccgctcatatccaggagctgggcgtttgacccagcatcttccgcagcgtcgacgatcagctgggctttggagcgggggtatttacgctgctgcttcctcttggtcgcttcgtccagttcgacgtccccaccgtcgttctgagtgagtgccgcggtgatctctccttcctcctcagcgtcacgcgcagcatcctgctggaaactttcaaagtcgtcgtcatcgtcgtcgtctgcatcgtcgtcctcatcgtcttcttcctgggcacctccgtcatcggggatatgaagtagcccgaacagagcaggtttcgtccacgatgaagcgttcgtcttcaagtgggtgtacagcgtcttcccagtgtcggggtccgtgctgcactggtactgagccttcacgaggcggcgcactcgcttgcggtctctgaatccacggaacatggactgcagacgcaccacggcgaagacgagataggagaggtcgacatcttctgtctcttgcccagcctcttccggtagtgtccatgatgtctcgcccgtataaatgttgtagtagtaggcggtctgcgaggcttcgtcgaagctctgctgccacgcgctctcggtagcggaagccgcagcctccgacgttggttcaccgggcagtgtccacgaggtttctcccgtgctgcacgaaagagaccagtgagtggattagagcatggcgttggtttggtgcagttttggcagagcgaggtgagcgtacaggcggttgaagtagtaggcgcgtccagaggcctcatcgtaggcttcttcccacacagagctcatgacgctttcaggtctcagtagctccacaagaggtggatccagcgcctctccagactacccgacgcacttcaacaatgtggtcaatcgcaaggacagataaaattaggtgctaaggagacagcataaatgagctgctgattctggatgcgacgaacacccatcatcctatgatgaaaaaccatgatatacgcccgcaacggcacagcaggcgtaacatgtacatcagagaaggaaaatgatagtatattgctaatatggtcaacaaaataaagtacggttcgtagattcaaatgatatacagctgcaggaggagcactaaatttgtgatgctagacatccaaagctctatcagaagctctattgtaatacccctgtatcaagcagaagcgccatgacattgatgccacaatgctctgcataagcgaaagcttttcgggccatcttagcgcggatgggccactggcatacaaacatttaactgcgccctcaccattaatctctggctggcccagggagatgacagcggtttgcttcatggggcttgttctgcagccaagcagctcacaatctcctcgtcagacgccaaaatcgatgcctgtatcgaagtggaaatgttcttggccaacaccaccggtacaagaaaaaagtaatttaaattgttttggatccggcagtgaggtatccatacagccgcatcgaggcagccgcgcacgatcagttcatgcagataagacgtatatatgcggcaaagctaactttgcaatgtcgatgccacagtgcacccgcagcttttagggtaaggacggagactgtgcagccactttcgtggcatcgcagtgtaaggtatctcttccagtaagttagtagaattagcatggacttcgtacggagaatctggttgtgcggtaatttctggtagaaaatgctcacgttgcgctggttatcttcaagtcggtggaatagcgcgtactgtacaggtaatccaggatggatcgcaggtttgaagtagtatctgtatcatgctactagtacacacttttggaagattattaaacgggtcttttgcgggtctggtaaggcttcgggtcagtaagaccctctccagacctatggatattttacaggaaaaataaaattgttttcatgcccgacccatatccatacctgagaaataccacttggcgacctaggtgacttactaatacatatcgatctagctgtagataaactggtagtataggcgaggccgtgtagcctacgcaagtactggtatcaattcatggacgagggcgagcgaatgcgagcgcgaggctcactcagtgcgttcactgaccaccaacacccgccgatcacgcgggggagcgctgcaacccgatttttttttctagacaccgcgcctggccgagtcgaggacttcgagtaagggggtggggcaggccgcacagcggcaccccccaagcgaagcgagagaggggcgccccccccccgtcttgaagtccgcagacgagagccaacgggcgagtgtccgcccccttaaaacatgatacacatgaccttcaccacgttcacggtatcttacaggtattttacggatcaggctgacggtcatactgaccagccaaatatacgtaccagaccaactaccttaccagacccgcacaagaaccgtttaaaatgtaaccacacctttcaagtacatgttttacagcggtacggtgaaactttctggatgttttaggcgtacatactgtatgtacgtaggcgttcaatcttacactggtgttgcacaataaaactcgatctaaaggctatcggataccattgtcgtgggtttacatgttaatccccgaaatgtttgtacagaagccgtaaaatggctcatatactgtactgcttcgaagtactttgtagtaagaataaggtgaatggggtctacagcatgtttattctacgattaccgcatccatgaacgcctctcggagagagccgccacacaagcagcgttggatcgaggtagctatggttgggtggctaccgtaccaaccaacctcatcgcaaagtgaggaccacacatacttctgcacttttgaaattgacaaggcacaagataaatgaaattcacgctgcgaggaacgcctttcccctcgtggagttgtccgaggaccaacaaaaagcgctgatcgaagaggccgacaccgtcgtgaaggagattgtggcagcgaacgacgccttcatcgcggatggaggcgttctccgagatccgcagtggcgtctgattcgcacgaaagagggtatgcatgtgtatcgccaacgcagaaaggcgatcaagcagcgagggaaggagtcgtccgctcctgtgatcgagagtccgtcgtggtcatccagccaaacactctcacgatatcgcccggagattagcagccaggaggagccatggtacgaatggcgattcgtcgccgtcgctgacttcttcatccgagattgccgacgacagcatcattgagaggtcagtttagtttctctcatggcccttcacggcactacggatggcacactggacgactgcatgttcgggtgctttatccccaataacgaagagtggaagctgcgcagttcttacatcaacgatgggatcgatgactcccgagtcgtggcgtctatcaggggcccaacagaggaggacccctaccgcttcctcgccatcaagtagttcgccaaggaacacccagcggtgctcacgggtatcgtgcagcagcgagatttcctcatcctcgagtccttggggttcatgcgcgactgcaacggcgagaaggtcggctacttcctgatgcactcggtggcactgcgagaaatccccgagctctcgcacttgaacatcgttcgcggactgatgagcttctgctacgtttttcgccagggaaaacctggcaaggtcgacatctacactcgcggcttctttgattcccgtggtgagatgccaggccgcctttcagtcgcgatcgctgcggatgccgctctctgctgtgtgaatttgatccaatatgcgtacatcaagaagctgacgtggctgatgaagcacagcggccacgggcgatctggtggtcatgcgacgcaatctacgcactgtgaggcgtgcgagaagagcttctccaagttttcgcttactcattccgggtcgggcacggcgtgttccatttgccggcgggtagtgtgctccaagtgcagtgtgctgaaaaagatggtcatggacgtgtcggacactgggtccgtccagcactgctcattccagttctgtctgcgctgtttactcaagacgaagaagcagtgtggctgggagattgcattgagtggttctgacactgcgtcttgagttctaccgacggaaaacttcaagcgtggcggccgcttgttgcgattgtacacttcgcagtctagttgtgtgtctccgtatcgaggcacgtgcttgctgtgaagttgttgccgatggtagacaactgtggtagacgtggtggaatactggtatctgattggctgagccccaagatttgacacttctgattggctgagagaaaggcaagttgaagttgcctttctggatacgatctgcaacatttactttttgctcccccgcctctcctacgacgaagtaggaggtatgcgttggtacgattcatgtttaagcatcggagactaggatatgatagttagtttggcctaactcatttttattcactttcggatttccttcctaaccaacactcgactaccaagcctcgcccgcataatctcaagtggttatgagcccaagctacgcagacaccgtgaagctcgtggaagacaactacttccactgggagttcaacatgcgagtgaagctgtcgcgcaagggactgcggcccacatcgtcaagccagagttcgaccagctgagtgaccgctccacggtacaatggaagactgacgatctgaaggcccttggtgtgatcgctggggacgtgagtctcacataccaagtctacatccgtggagcgacaaccgctgctgaatcgtggcgcctgcttgaggagcagttcaaccggaacactctcaagaatcggctcgtcgtgactaagaagttgcacaacttcaagatggagcccgggacgcggttcgcggcacatgtggaccggctcaaggagctggtgctgcagatggagacgattggtgaagctctggacgagactcgccaactcgtgctgctgctgggcagattgatggacgagtaccggatgatcagcaccgtaatcgagaacacgccgaacatgacgttggtgcacacggacgtcatgggtccgatacagaccaagacacctggaggctgcacatacgcagtgaccttcatcgacgactactcgagacacgtgacggtgtacttcatgaaggcgaaatcggaggtgctgtcgaagttcaagatcttcaaggcagcaatggagaacgcaacgggcaagacgatcaagcgcctgcgttcggacaatggcggcgagtacacgggcaagctgttcaaggcctacctcgaccgcagcggcatcaaacatgagaagacagttccgtacacgcctcagcagaatggattggctgagcgcatgaacagaagtttggtggagatggcgcgctgcatgttctaccatgaaggaattgacaagaagtggtgggcagaatctgtcaacacggcggcctggatcatgaaccggatcccgaattcggtgaccgtcaagacaccccacgagatcgtgcaccgagccaagcctcaactcaagaacatgaaggtgtttggtgcactcggctacgcccacatcgccgatgaaaatcgtcggaagctggatgcgaaggcgttcaagtgtcgattcctgggctacgaggatggtgtgaagggataccgcgttctcaacgtggcgacgggaaaggtgcaaatcgtgcgcactgtgaagttcatggagacgacggaacccgatcacctgatgacgcgcctggagattgacgacgatgaagattcgactccagcggcaccaagctcgggcggcgtatctgcactggtgcctgttcgcgatgtttcgactgaagttgaagttggcggcccgactatgttgccgaatgacgtgacgacaggtggagcaatcgttccgtacactacccatccgatgattactcggtcgcgtgctcgtcacattgaagagaccaacgatcctgaggaacccggagctcgcaagaaccaagtcgttgcgccgtccgagatcaggacgaagcgtcagaaggtggaccaaggtcgcgccaactcggacgagaaccaactcactatccacggtgggatgctgatggctgcaacggaggaggtgccaaggtcgtatcaagaggcgattacgagtgaggatcgtgcccaatggaaggcagcggtcgcaagtgagctcaagtcgctgatgatgaacaagacatggaagttgatgcccaagcccaaacaccagcgcgcgattggctgccgctgggtgttcgcgttgaagcgcgatgagacggggagagtcgttcggtacaaggctcgtcttgtggccaaggggtacttgcagcgccatggaatcgactacgaggagacctactcgccggtggtgtacctgaactccattcgtgcgaaactcgcgaagtgctgcgccgacggaatggaaattgaccagtgtgacatcgacactgcgtttttgtatggaaagctcgaagaggagatctacatggtgttgcctgaaggacttcgagaactgctgaatttggctgaagctcaaggtgaagatgacgtcgtctgcctgctactgcagagtttgtatggactcaagcaagcgtctcgcgtatggaacgggacgatcgacgcgcatctcaaggacatgggatttcgagctgctgatgccgacccgtgtgtctacgcgagaggtgctggtgacgacgagtgcattgtgtgtctctacgtcgacgacatgctgattgcatctcgccagcggactatcattggctcggtgaaggcaggcatcgcggacaagtttcgcatcagggacctcggacgcgctcgattcatccttggcatcgagatcgactacgacatgggggccaagacgatggacatctgccagtgggcgtacaccgcgtcgatcatcaagaagttcggccagcggaatgcgaagccgtgcctgactccacttgacccaagtgtgcagttgaccaaggtggacgaaccccaaaacgaggaggacaaggccaagatgaagtcgaagccgtaccgctctctcgtgggaagtctgatgtacctggcgtgtggaactcgaccggacatttcagctgcagtggccaagctgagtcgttatctggagaaccccggtgagaagcactgggatgctggtatccgtgtggtacggtacctgttgaagaccaagaatctcggaatcgtctacgatgaattgcttggcacggagctcgtcgcgtattcggacgccgactgggctggtaaccgcgacggcagacgctctgtcagcggaatgatgctgatgatgtgtgatgctcccgtggtttggcgatcgacttttcagaagacggtcgcgctgagctcgactgaggcgaagtacattgcactcagcgaatgtgtggaggaggtggtgtggatgcgactactactcaaggatttgggtgcggagcaagatggacctacggtgatctacgacgacaaccacggtgccatggcgttggcgaataatgtcggctaccaggctcgcaccaagcacatcgacatccgctatcacttcatccgcgagaagatcacgagtggtgttgtggagctcgactacgttgagtccaagaaccaactcgctgatttcctgaccaaaggactctcaacgcagactctttgctatctgctggagcgcagtaagatcactgagatgctcgggtagactgcgaattgagtgggggagttgcgattgtacacttcgcagtctagttgtgtgtctccgtatcgaggcacgtgcttgctgtgaagttgttgccgatggtagacaactgtggtagacgtggtggaatactggtatctgattggctgagccccaagatttgacacttctgattggctgagagaaaggcaagttgaagttgcctttctggatacgatctgcaacatttactttttgctcccccgcctctcctacgacgaagtaggaggtatgcgttggtacgattcatgtttaagcatcggagactaggatatgatagttagtttggcctaactcatttttattcactttcggatttccttcctaaccaacactcgactaccaagcctcgcccgcataatctcaagtccgctcgctctcgaatattacggacccccacgcttacaaacgaacggcatgacagaatcatttacccatgccgactacatgcatggatggcaagatgttcgtgtgcatcaactaacaccgatactaatcgttggatctcctttgacaaatgcggggttcattaattaacctaatttcacaaaccgaacgagaacatgaaaattacatccagaaaattatctgaaaactaactaatcacgaagcgatgccctattagactgattgtctaaatcaaattacaacgcttaggatcgtagttagtgcttggtgcagggttcatcaattgctgcttatcataaaatacttaacggatcggcttgttgcatcgcttcatataggataaaatgcacgtgaagctattaaacgactccgatactgatgcgcaatagtctaatacttaagtagcaggctggatattgccgtagcaatatctcgattttaccaccgtgatccttatgcatcaggtagcttcataagcttgtcgagtttgcacaagctcgactacatcctgtcgtgcgtggttagctgaacggatgagggtcttgtgttttttttatgaagggggcttatggagaggagcttgacaagttccttaatattcccccattgtaggcttccttgaatactatcaagactgtttctggggaaatgttctccgcggaattcgcgccgctgtgattgtggtactcgaaccgccaccagcatttacaaacgcgtcgttaacagtaccggaagaaatgcgatcatcatcccgtaaatactacacgacttccccaagttcggctatcatcgcgtagacgcgttggacgagctcgagctaacctttccctgctgctaaaaagcttcacgattttaacttgctcctcaatgccgcgcgcatgaaagacaaagtcgcattcgcatctggctgcaatgatggcctgatcagaaatattaacgttctcatgcagcagtcgaatcgaagagaaccggggcttttacgcaaagtccagcgctctgtcataccttgcggatgttatgtgtcctataacatggaggtatagccaccttacgctgccttgtcttgaacccactcatcgttgactcgaccactgacatacagatacttgaccgagttcggctcttgctactgacaccggaaaaaagacccaacgaaaaaaacacgggggggggggaatgaatgcagtcagaaaatatggtgctttgcagactttttggcacttcagactgtaactcgtacgacttattgagcacgacttatctataaatcgtactcgagtacgaattgctgtaagtcgtggatggtcaatcagaactacctattgcactacggtattgtgttttgcaatgattttggcaatatggggcgagatttgctgtatttatagcgaccacgtgctagatatacgataaatcgaggtgcataaatgggtggaggcctagaattacgctaaaagcgccacaattgcacttttgaaagtgcaattgtggctgtgcagctgcaattctgtcggctttcatccacaaaacctagtcacacggcaattatgcataagaggttggatgtgctgaggatcatggacggtggtgtactgggccaatgcatggctgctggcaggccctcccaagtcgatatatatatgaggaggtggatttatggaggtcgtgtatcttctttcacacatatttaggagcaggctttgccatatttagcgtctaaaatggccggcaaaatcattgcaaagcacaataagtagtgcgcatatgtcatctcctgcatgatttagcacatccagcatggattagcatccttttggcactttccgaaagtgccatttccgagccaaactgcttcgaaacacgacttgagcaagtcgcattcaaagctactatgatttaccactacagtaagaagtgtaattagtgtgggtccgctaatagtgtgagtgcgtaattagtatgggccacactatttttgcctccctcgtgaggcgccaccaacccacactaattgtacgcgttctgtaaaggagccagtccactcattgtggaaccgaacaaagaggacataaggacaagtacgaatggcgagtacatgcagcggctgcggaggggacactaccagtgtttcccatacttgcgacctgtgcggaaacagaaaccgcccattctgtggtgtgcctgtggaggagaagcaaggaggccacatccggtgccaagcgtgcccaggctccgctgctccgctgaagcgtggaccagtactggcacaagcgacaaaagggctaaaacagtgcaaactcgcagctttcctacagccacctctccagcgccaggccaaacctaacgatgtacgtcaagctgtccgggagggcggaacgaccgaagccgtgtcaaaccgcaacgcaccccaatccagcgacacgctcgaccctcgcgctgacgcggacactgcagccgagtctaccagcggaaccagaaataatgacgatgctagagagcattatcaaggacatcgggcgccgcaatcagttgcaactctcaccgacaaaactcgggttgtgatgttcatgatgaaacttcatggtaaagggcaaactagactaccctccaaagccgtggctcagtttcctggcattgttcccggcaatcagaaagcaaacctacagaaggctagccgatggtggaaggagcgggcccagcacactgcgaagaaacgtaagtcagtggtcaaagtgcagtgtggcgtcaagaaacgaatgagactgaaggcagcgtctggcagagggcgcaaacgggcgccgtgggtggagtggttgtacagcgaaatgctgggcgagttttgccgtcttcgaaagacaggagtgaagttgtcaagggggctgctgcatcaaattgcgattcatatattaagtacttcttcaggacaatttcgggctacgacgattggtgaaaagggagaaatgctgaaagatcgtgtatgttctcgatggattcagcatttctgttcttgtttcgatattttatctcggaaacaatgtggcaaattggaatgcagccccgagaaagaagtggcgattgagcgaagtgttgcggcccatctcggaaagctgaagcgggcatttgataatggggaactgaatgaagataccatatttaatatggatgaagctcacttcgtgatcaacatggataacaaaaagaccctcgggttccgtggagataaaacaattcggtaccacgatatggtcagtggggggagggcatgacgcttgtactaaacccctccagcccgaagcattttcaatttttttaagctgcatatgcaactttattttacttgaggtttgtatacaaagggatgtgggaaatgaaagcagctgggtaaagccggtcgagaatgtgtatggacaagtctaaacatacactaagctgcatatccgaacttgaatattcaggctacacctgcataatgcagcgtggtctgacgtgagaaaaacagaccccggtacagatacgagacaaggtcggctctcactaaagccccatcctcacaaaaaaactctcatacaaaaatctatagagtaagtaggggtgtcacccccagttactatcgcaatcaattgaatttgctcccacgttgtaacggggttacacgagagttaccccacgggttacgaagtgggtacacactgtctaacctaaatcagtaggagaatcagtacatggcttcagagccactgattatgcgtatgactagggttcactatgctagatagtgaacctgatacaattacaccgtaggcggctttgccgcaataaagggaaatacattcagtttgagattcacacagttaagagttaagggttgactcttggagtacggactcgtacgttctggtatttgaacgggctatcttaagctgagcctctgtgagtctgttaagcttcctctgacgcaaagctacggcagccccgctgcacttggtagcacttgtagtcaatccgacacctgagtctgtatagactgaccctctgtggagaatggagcagttcgctcacttacccccgaaccagcaggatgcgcttaaaaagcttatgtccttgctgggtccggagggcgtgacgcaacttgcgcagcaaggccccgacgcggtgaacgcgcgtctcgaggcgttttcaagctacgagaatgctgtcctagagcacctccagcagaggatggcgacggccgcggcgccccaagcgcccgcttcgtcattcgacgcgggaacaagacccaagccgctcatgttgagcgtgacgaccttcgaaggcaaagagggtgaaagcttgatgctttggacccgtgaggttgagatggctatgagctcagctctactccggacggagtcgcagtgcgtggcactagctatctcgaagctcggtgggcgagcgagagagtgggcactacgtcggtcgaggtggccttcccgacgtgggaccagctgaaacagcaattgtctcgagtgttcgctccgcctaacgaggcgtatggcgtgcgctcacgcttcctgtctgctcggcggcgcaagaaggagttggtggactatgtccaagaactgagaactctcattgcaggaatgtctgctgacccgttgccggaggcagtcaccgtcacggtgttcacggagggcctccgcactggcgttgccaggacggaggtgttccgaacccacccgagctcttttgaagaggttgtgagcgtcgcattgaatgcggagcacaactttaagtcgtcgagacttgggtggaatgcgtcttacgctagctcgtcgaatggtccggaacccatggacctcagctacgctgaagacgaagaaaccgagcttcgtgctgctgagcagcggcgcggtatccgcagatgcttcatctgtggtgacacccgtcaccttcgtgctgggtgcccgctgcgccatcagcgccaggcttcgtcaaaccgctcctctagttcgagccagggatctggttcgtctcggggaaacgagaactcccagtaggcgcggggcggcctactggggaagaactaagttctattgagcctcggcgaggtggaggtcgacaggacttagccccgaagagagccgtactctctaacacggaacgtgtatgcaagccgggcttgctagttgtccaagcttgggtgaagggcttcaccaagccatggacgattttgatcgattcgggagcgtcgggtaactacgcccggcgttctacgatggacggaagtcagctttatgctgaggcgctggtagcgcgcgggagtgacatcgtcactgttcgtctcgcgacgggcctaaggtccctgtggacctgggcgtgaagtttttggattttgatagcgtgaaacgctgtccggtcttagacctcgattcgagatatgatctcatccttggtatggcgtggctggaacgccacgagccttggatcgattggaggtcgaagacccttgctgccacgcacttctctccttgcggagcattggctagtcatgaacccacctctgctaggaagcagaagctttctggcgcgagcactggaccgagtcggtcaatgtgctggacatcggagtttccgagttggtggacactgtgtgtagcgttccgagcgtggctcgcggacggcaggtggagcggcacgaattccgctgagcgggtgtgcgtctgagggcgacgccctgctgcgtgccagcgacggcgcggtcggtatgatgccgaagaataaggggctttgcccggatgaagatcgtggagtggcacgtaatccactgagtggaggctgcggatcgtgcagctcttcgctgagtgtcggtaaagacactggagttcccccggagctgaacgaggtggtgacacctggcgtcaagacgcacgcgaaatcacggagctcttcagggcggacggtgtccatgaagaggaggcagcgccgcaaagcgctggctgcgagacgcaaggcgtctgcgatctcacgagtcgagaagggcgtgttgagcggtgaggctccacgcgagagcgagcagctctatacactcgtaaatggagtgacgggcgacgtcgacagaggtatcaacctcgacgacttgccctcactgtctgctctcctggagctggacgagatgtccttggccgagttcggcgaagccttgaaggctggagacttggctgaggtagtggtcatacgacccgaagaagagttgaattcgtcctcgcttctggatgaagctgtcctggaagacaccaagatggcgctgaatgcgcggagccgatcggcgatcctgaaggacccgtcggatcccttgtatcaagtggtaaaggattaccaggacgtggtctcgatggagccgccctcggggctacctccggatcgaggtgttcgacacgaaatcgatctcgtttcgggaacgaagtactgcgtgacgaggcagtggcccttgccgaaggagcagtgtgacgtcattgacgcgttcttccgtgcgaagcacgaggcgggcatggtgcgtgagagtaaggctccacactctacgccgacgttctgtgtcagaaagccgaatggcaagtggcgtatcgtgcatgctttcaacaagctaaatgccgctaccattccggcgcagacgccgattcctcggaaggatgtccttcagaacaacatgacaggatgtacgatgtacagtgcgctcgacttggtcgatggatattactaattgctcatgaggacgagcgacattcctctcactgcggtgagtactccgagcggcatgctctgggagtggttggtgatgccccaagggatttcgaacacgccagcgacgtttaatcgtcttgtgacgcagctcttcaggccccatcgggcgtacgcgcaaacgtacttcgatgacatctttgtccacagtcgtgcggagcacggaaagactgatatggagaaccatgtggagcacctgcgtgctgtgctcgaatgcatgcgtcaaaacaagttgtacaccaacattgacaaatgcatcttcggagcagaagagatccccttcttcgggtgcttcatcgggaagcgtggcctgagggccgacccggtcaaggtcaaggccattgttgactggccggttcccaagaaccagaagaatcttcgcagtggcttggcttggccaattacttgcacaagtacagcgagaactacgctgagatggctcggccactctccaatctcctgaagaaggatgcgaagtggtgttgggacaccgaacatcaagatgcgtttgcggcaattaaggacagtctccttcatgcgcctattctggctttgccagaccccgctcgtccgtttagtgtcgtctgtgacgcctcggactttcccatcggctgtgccctgctgcaagcatcgatggtaaaggtacagcaacgctgttcttggaccgagtgtttcgacaacacggactccctgagtcgattgtctcggaccgagacccccgcttcacgggccacttctggagcgcggtctttgcggtgcttggcaccaagctggacatgtccacggcggaccatccgcaggccgatggtcagacagagcgcgtgaatcgcgtcgtcgaggacgtgctccgcagcatttgcgctgagacgccgaagcgctggagcgccatgctgccactcgttgagtttgcgttgaacaacgcggtgcacgcctcgacaggctacacgccgttctacgtgaacagcttgtctcatccccgcgtcccgctgacgccgccacgtggtggcctcgggcttggtgggggaggagaagccgatttagctgatcggctagccgatgtcagcccggctactgttcgtaaacaggttgacgttttgttgtcgacgcgtctgagtgtcttacgacatgtgcgtgacgcaatggctgagagccaagacaagcaaaaggaacatgcagatgccaggggcagaggcaatgttgaaagttatgaggtcgggaacctggtgttgcttaatgctaagaacctacctacacatgcagtgtcagccgtcttcaagacgaagttacgcccgcgcttcatcggacctttcaaggttgtggccaagaagggccttgcgtacacgctcaatcttccgaagaagatgcggacgcaccccgtcttctacgtgggcttgctcaagccgtaccaggacccgatgcagatacagatggaggcaccgagagtgacgaggtcacaggcgcggaagccgcggtcgtcgaggacgcagtcgcaggcgtcgacgcggccatccacgtgggcaccgcaggcacaggcggaagaatcggcgccggaggtgccgcgggcacagcgagagccgcaggcgcaggagacgcagcaatcggagcctgcacgcgggccaggaggtcgagctgaccctgaagcacagcctactgacgctgtagctcctcgagctcccggccacgctgctcatcgcgatcccgatagtatcgcacccagtcctccagggccccaaggcggtcccagaccgctcgaggcacctcgatccatcgcgtccgctcggcgagctcgtcgagttcggtggcagtccgacccatacgcgaatcaacgtcatggatatgatcccgaaggcgaccgcctgctgccgcacctccaagagctcactttgagtcgcaaagggccccacagcggcctccaccggctctgctcgatgagcatgggaatctacattaccatgtggagcgcctcctggcgaagcggcggtgccggggtcaaaaccagtatctggtgaaatggcgagggtaccctcactccgagaactcatgggagtttgaggtgcccctccgccaagactgcccagacgtcgtggacgcttttgatcagcttgatcaccagcgccccgagggctcaaggccggcacgccggccttcccgcgcttcccggcaataagctggggagctgctgggtcagccacattgctccgaggctgaccctgagcaacagcgctcactccctcgcgggaaggagcggttggagtgcttgaaggagcgaagcgcgcagcgctaaactgggtctgcggctgggcgagtgccgagaggctgcgcttggctcggaccttcgcgaaatcgaagcggagcttgcgttcaatgcgaacatccacttcactgaagctggctcggagagcgtccatggagctgagctttcggctgtgctcggcccaagcctcgaactgagcttcgtactcaattgagtcttcccacgggctaagtaccaccgggtacgtccgcatggcgggcacggacttctgctgggcttgcagccgcagcctctcgcgatcctccgcgacagtcgtagactgtggagtgaggagccgttctcgcagagacgtacgtagtgcgagctcctccggagtacgggccctgggcccaatggtgtgcagcgcgagagactgctggaacgcctggcgacaagccttggcggggtcgcgaggccggaagctgtagtcgacagtgctggggttcagcagaggccgcagctcggggcgctgggagcgcgtgggagccatctgcgccgcaacctgctcggactgagcttcgtccaaagggttggaaatgacggggcccaggggcacgccctcaccacgaggtggcgaataccgtggctcagtgagcgcgcgcagctcgtagaggccggaagagcgttcagggaacgggtttggagttcgcagcggtgaccgcggctcctccctcgacggcgcagcgcgctctgcaggtggacggctcggcgagcgcacagtagacgtgtgcgcggggcgctcttgatcgcgacggctcggagagccaactggggccggcgagccttcgtcacggcgtgtcgacggtgtgggcgaagcgtcgccgcgactcggggagcggggacgcatctcctcggttcggagaaccctctatggactcgtccacctcgccctcttcaccaaagagttccctaggatccacgatctgacgggttggtgctcgaggagagctggggcttgcgcgctgcgagctgcgctttaggcgttgcgccgagaagttctcagagaagtccacgcgatgtggattgactcgttcgagaaggaggcttgacggaacaagacccggtggttgaccgttaagcgtgaacacccgtgtccacggtttggtgggggagggtgtaacggggttacacgagagttacccgacggattacgaagtgggtacacactgtctaacctaaatccgtaggagaatcagtacatggcttcggagccactgattatgcatatgactagggttcactatgctagatagtgaacctgatacaattacaccgtaggcggctttgccgcaataaagggaaatacattcagtttgagattcacacagttaagagttaagggttgactcttggagtccgttaggtgtacggactcgtacgttctggtattagaacgggctatcttaagctgagcctctgtgagtctgttaagcttcctctgacgcaaagctacggcagccccgctgcactcgtcgtagctacttacggtctacctgtatgttttacgcctcttgctgctgctagctggtccgataggtgttagcggcgtaacaggcgtccctggtgttgatggttcagccactgcgtcggcgggtcggcgcatccggatgcttctccctgtgtctacgggaatgagcttgccatgcatccactcacgtgccaaacatcccagcaagtcatcgcgacaccgcgcatcatgcagcgcggcttcatacacaggaatatgggtccctgttgactgcactcgccgcaaaagtatgccgtagtaaccacgtatgcattagtatgtttatcgatagcttgcaacctaaatgataccgcataagatgcagtgtactatgcagcataagatgcaacataagatgcagcacaagatgcagcttaggatgcagcttaccgatatctgaaccacttgcggcttcagcagaatgaaccgatgcgccgtcgagctgcagtgttccatcagacgcagtggcatcgtcactggagtcggcggactcatcgcgaacatgcggagaagtagtacagagcgcggtagacgttgagatacggcgcggaggcgttgtcatgggactctccgtacaagcaagcatgcaccgcgtaggatgtgatgcacgacgctcacggttcagtcctgcacgcgctgtagaagacgattcttgggcacaaacagtaggaggtaagccttggccacacggagtcatagccggcacttggacacgtgcaacacgagtttgggcttgggcatgtgcagcaggaggtgggccgtggccatccgcagctgaaggtagctgggcatgcgcagcaccagatcgccattgggaacggagagcggcaggtggggcttgagcaacgccagtcgcagctggtccgcgggcacgagcaggatgaggtgggccttgcgctcgtacacctggtggcacttgaccactggcaggttgaagggaagaagcctggcgcgcaggtgtcaccgaaagaggagggtcccttgggttagcacctgcagcagcttggccacgagctgggctgccttcgatgagatggccgtatgtttcctctacgactcgggcagcccgctccagctgagcatccccgggtccgacggacgaggcgttcgcgcgcgcgtttgcagtactgcgtcaatacacagatcgtgttagcgtgtaatcgataaataaaataccagtcaaaacttactgttggcgtaatactccagaacggtgccctcgcttagaaagaagtccacaccagcagtgccgttcggatctccaccaggccggacgtagagatagcggccatccaggcttcgtcgtggaggtcgcttgcttggccatcctcgccccttcaattctctccagacggaccctaatgataggtctcgggaggtgacgtcgcagtcacacactagctttcctcgcggtttcaccatcgtccagtgtcagcttgagcccttggcgcgcgaaatctcgaatgagggggattcggacccgtcagcggttggcggacggtcgttccctgccaaagctgctaagcacccagcaaatcaggaaccattatttgttattgacggactattttactgatcaggtttgggtttgtaacagaaaccacacaatttccatagattgtctatcttaaagtttgtatgcatattgacaagggaaaatacagcctatacaaatttgaagtcaaaaccgccgttatgtagcataatgcagcttaacaaaaaagattatgctgcattatgcaacactccgggctggaggggttaagatccgtgggggaaaagtgcgcggattgagccgccaatgctgatctttcagaatcagaactgcagctatccgattcaaaaagtcccggacgatgtaccgagcgtgtggacctaaaggctggatggaccagcgcttgttccgtgtgtgtctgcaaaacaacggctgcaaccgccgccatcctcacgatcagaaacaagttgtctgtatggataatgcaagcggtcacaaagtagatgaatgtgaaggtattctcgaggccaagaaaatggaagttgaattcttgccggcaaatacgacacacttatgccagccagctgattattttatcattaaagccatcaaggacatttggactgatgaatgggacaaggaaaaaagacgtttggcagcagaggggagtttttcggatgcttccggaaaagtgaaaaatcctggcaagcattttttcttgagctagcggctcgttgtgttcgggctgtcagcttaaaaaaagacgatgacgggattctttacccacgaaaagctatgatgatgtgtgggttatcgcttgggctcaacggcaaatgggaagagtctcaactctcccagcaccttcaagtcatcatggacaaatatcgtgacgagttcgacggcaagccagctacacagacggatgtggcggaggtacaccaggatgatggagagagctccgaccaagtgatagaagagatacaactgtagtgcctttatgatgaatagagatgcatagaggtgttggtgaacgttgccttattcattgttcatatgtaatgagctgatacgctcagtggcgcgcaaatactgtgaccgcaaatataccgtgggtgcataattaccgtggcccacactatttaattacacgtcttgagaatggtgaaggcgcaaataccgtggcccacactaattacacttcttactgtagctgagcatctgtacagctgctaataggggcgacgcgccgtagtggttagatcaaccactacggtacgacgtccccatgacccggagtcaatctgaattcaagcgtagtagaagactgtttccggaagcgacttaggcgcgccgcacatgcggcacaccagtcgctccttggttattctctactatacttattaataactgttcataccccacatctttaaactgagactagcgcaggtgtaatttggctacgcgaacacgtaaatcattgcattgcattgccccacatcttgctgaatgagcgcttgcagctccgcaccttgatttggacataccggtaatttcaaggtaatcagtatttaaccggtactgatgtaaaattttgtacctccactttactgactacagtaggacaacctatagcaacttgtggattgtataaattgaaccccttggtatagtatgacaaatgtctcttaaacccaagtaaaatttgagttcgttttaaagcgagtcctcagtacagatgcctcccctacccctgagggaccaactcaatgtaagtggagacttcgtccccaactaagtacgaacactaactagtgcacaaattaggagggcaaactggttgcaaagcacaatacgtcctacaccagacaaattgtcctgcaaatgcaggtcggtttgtaggaccggttatatggattatggttagtgtaacagggttacacgcacaagtggctacagtcacttgtaactctaatagatacgacgtctgttagaggttcgaaagactttctcgaccttggtgtagacacaccaaatgctacatacatttacgaccaccatgacgggtggtccatagagacttaggattcctattggctgagaacagcatctcttagccaatgagcgacatgcatagcattggaattctgccaaccagccgttggcagattcctatcttagaatcttagaatattacatttagaggaagtcagaaacataaaacaaaatagcagttttcattttaatccaaaaacattatttggatcgtttatttagattaatctatactcggaggcccgagtataattaactcttaagttaaactaagctacgcttcctcacatacacgcggacacgtgtaagctaaagtagtgagccaaagtaggcccattacacctggtagcactttgtagtccgtccaacgaccgactacctgagttcgttcgtcaccgcacgaacgcggagctgagaaccttcccatggatacggaggtgtccatggaaagctccactacgcctgcaactcacgttgcacgcgctgactgtccccacctgtcggacccggagtgggaagctctccaacgactgtcaacagtcattggtgaggcggctgtagctacgatgctgcgtacgctatcgccgacagagcaacatggtgttgctcagggattcatcatgagggagcagcgagatgctgcttcgtctaccacggtgtcgtcggggacgacaccacgcgcgcaatcgctgaagctcagtgtgagcaattacgttgaaagggaggggaacctctcctcggttggcttgtcgaactcgacactgccattgcggctcgacgcatcgtcgacccgttgtcgaaggtcgtgaggcgaggccaatgaaacctttgtcgcccaggggggttcgtatagcgcagcccaagactgttccccaggggtagacccagagaatcgacttgagagtcaacagcaagaagatagacccaaagattcgcagccgcaaaactttaaaccctgaaactcactcctcttggttggcgtgggtaccttgtgtaatccctgtcggctcgtttgtcttcgacagaacggcactccaccggttgaaaatgtagcctcgaagaagtgcgggagcgcacgtctacttcagaacgcacctccacaccaaaaggcaaacccagagaatcagatcccctgaaacccagaatatcacgaattcagggtccaggttttcagtcaactctgggacttggaactcagaagacaccttacccaaatgccctcctaactcgataaaaccaacaaatacagagtatacaaacactacaactagccgtcacttattgttttggacccttggacggtgggtcacacacacactaggctcactcgagtctgaaattcaggggcctagctcccctgagactcacacaaacgcgcaccacctccaataaaggaggaaaatacaatcactatcagttaccttcccttcacacaagcagtcaatacaaaatcctggaggtgactacctagcaccccagaataccctctggaataatatgaaatgggctaccacgagcacagcaagtggcccaaccaggatatggaatagatggatcaccccacgaagctcaaggccgtcgctggtcaccacctaactggacttgagtttgatggagcccacacagacggctgtccttcgccgttgatgtgcccttagcgtcccgcggtcgtagtctcgggtcctccggatttccgtcggcaggcttggccgaagtcacttgcgcagtacagggtaaaaggaactctgtttggtttttatcagcaacttctctctctctctctctctctctctctctctctctctctctctctctctctctctctctctctctctctctctcttcttcgggcaaatatcttctgttcactatgcttggggtcaaaatgtattgtcttgagtataccttgggatcagcggtccaaacttgcgatcggcttgcgaatccattgtcgcacggcgtcgaaagtgccaattgtgggtccttcgacttggtttagtatggtgcaggactccctctcgactcctcgaaagtatccagtctgtgcatccacaacggttcttcaaggtcacgcatcactttgattgcagactggcttcgaactgactcgagtccctgaaaaccaggtgacactcagggtcatcttctgaaatcctgggaattctgaggaatcttggggaactgtggggattcttgggtgttggctcgggaaacacttaagttcagtatagagagtctggatttatggtccaaacccagagaatcatctttggaactctgggtcacctgcactcagggaggtgaactctgggtcatcgtgcggcattctaggtttccgtgcggcactctaggtaacaaatctgctgcagtgcagactcgtgtgtatctcctcaaagccacacttttagtgggtttagcggcctcctgctcatgatcatggtagtagtgggttgattctcagggtaatttgatcctctggggcactctgagccacagcaagatgaggcgtactcattctccagagacactttccgccagactttaggcactcatcgtaagggaaagtccgcggctggactgagtgttctctgaaattctgggcgtgcactcccaggattcacacttccagccagttgggcccatctgcggtcagacgctggattcatcccgagaaatcacttctctcccacagtcgccatccatgtcacacgggtacagccgcgccgtatcccagtcatccaccaatcagcatccgatacaaactccaggtcacagaggtgacggcacatcgtcggcattttctggggaccgcctcatgtcaaccgcccctcctggtccgggtccatcaaagagaaaatcgctccgaactggtgaaccatggccaggctacaaaaacacacaggtccatccaccgtcgacttcgatacggccgttgcactctgccaactccccagggtttcactcactttggcgacaccctgtctccccaacggttggtcaggacctatcttcaaggttctcctctcaaacgcaaaaactccaacgggcaatgcgcggtcacatcgccatttcgcagatcgtcaagatggcggagagcgcgactttggacggcaagcaagagacggcgccagctcaaggcacggcgccccccggcagcacgccacctccgacacagcagcgcaccggcgacgcccctgcaagcaccgcaccagcaggcggcggcagcggccaggcgggtaactcagcgtccggcgacacttcgacggacagcaccaagacgggcgcgaccacgcgcgtctccttctccataatcaaatcaaatcacattcacgttttccgtctccaatattcacacattccgtcgatttcccccagagattcacagtgtcacccagagtttcccctgaatatcacgtgtcactctgggtcattgtcaccccagagtgctagactcctgggtgatcatctccagcctgcatggcctggaaacgggcccgcgctcttgcgccttgattgaattcgtagagcagggcaccacagttgagcttcgacacaggcagccactcggtctcatcataccccttccacttcacaaggtactcacgaattcgtctcgctgtccgagtccgtttagtctatcgcaaaatccaggattcgctcaacttcgtactcatcgttcgcagcgtccggctcccaactgtcttcaggcaacagcgccgcatcaaagtcatcatcctcgtccccgtcgatctccacagtgggccgcttcgggaatagtgctctgggtttcaaacggctcacgtctacccagggattcacgcgatatcctgtgttctcgaccctgagtttcacgcggaagttgtcatggatttcctgaattctgaaggggccatgccatatgtgagccagtttgcggctcagcccgggcggcactttgggtatatagagccacatagcatcaccggctgcgaatcctgccttcagtcgttcggacagctctctccacttcctggtttgttcggcagagcgcgcgcgcttggccttcttctgaagatcctcagcgcaggcttgtgcataactatagtcacgctgtagcttccagcgccactcgtacacagtgcgctcctggatactcgagggcctgggtcctaacattgcagacaccgtgccgtgtgcgtcccagccgtgcaccagaagaaacggagtgtccaggcgagtggcatcgaacgatgtattcagggcaaacatcaggcgctcagcatggtcgtcccagtcactctggtccgcctcagcaatgtacgctcgaatgctgcgcacgacagtctgcaccgaccgctcctgttgtccgttcacctgggggcgatacgctagagtggctcgctgcttgatacccaaaagtttacggaagcgcgtgaacacctcactcatgaaccttgggtcttggtcgtgcctcagcatcgagctcgcgccgaatctcctgaagacctgctcttcgtacacttcagcgacatcttgcgccgtggtggaactacatgacgaatcctgagaacgcatcctgaaaaagcagcaggaacgtgttcccacggtccgacttaggcaagtgtgtcgcgaaatccatagacacaacttcaaaagggcgcctcggttcaatgttcccaggggaaggcgctggattatgagggcgccccttgccgctggcgcaatccacacactctttgacgaaaactccacatcagcgtacatgccgtaccagtagaactcagagcgcagcttctcgtacgtcctcgtgatgccctggtgcccaccctgaaaatctttgtgagcgtaatgcaggatatccggtcgcagggctttcggcaccacgagtctgagttcgtcaaccatgtctcggggttgatctctggtagaccgactcaagcggtacaggacttctttggaatccaacacgaaatcatcagcgaccttcgcgagtttcctggtttgagcgtgcaacagcttcgtcgtgtctcctttcaggaaatccttgagttgcagcaggtgatcatctttgtcctggtgcactttgatgcgtcgcctgcgttccgcctggtactccagaggtcccatgggttcgctttgggcttcgatctcctgagttcgcgcccgagtcattactgcaaacactttggccgccacaggcaacggagcgcgctcaggtccagggatacccagagtttcgacaccctgagaatcacccccctgaattccaacgttcaataacaccatcggtcttaccaacttctcgtgaatcttgtacaccaactgcagatgtgttcgttcgtcagcatcctccaccttccaggattcaccaagcgcgagggtcttagatgtcaggtagtctgcggcctggttaaactctcgcttgacatgcgccagctgcacagacttgaacttcgtcttcagcacttcatactcggccagcttcctctggagattgggctgattgcagttgatgagaccctgggcttgctggatggcaatcctggagtccccaactacaacgatgtcctgaattccacgctcaatcgccagagtgaggcccttcagaagtccatgatactcagcgtcgttcacagtcacgtcctccagggtgaatccctgggcatccaggatttcccacccggggacatcagccgcagctcccttgtcgcgtggaagtcttagcggcgccatcgaaactcagaatacatccgcttccagcatttccatactgataggcactggaggtttaacacgccccttagctgggatcaggttttcagcgatctcatccaagtgttctctgggggtaatacccgcaaccagaattgcagccaagccgtcttcatcccgttgaactctgcgtatctccaggttccagtgggacaacttcagaccccacttcaccgttcgaccgtctgccgactgcgaggttagcaaccacttcaacacagaatatcgcgtgtagacgacgatcttagggctgccttcaaccaaagtgcgaaacacctccaggactctcaggatagcaatcacctccttttccgcaatgtgataccgcagctcagcgtcattcaagacgcgacctgtgaatcgaaccgggtgcacaatcccgtcgtactcctggcccaacacagcggatgctgccacgggttcgcgtggggaataatcacgacgggccttgaacgatctggatgtctgagcaacggagtcgatacgatcttgcgcttcaggatttcaaaggcttcctaggctctcgacaggtctctcctggattttacttgttcctcagtcagctagtacaggacggccgcgatcaggggtagatcttcaatgaacttgttgtagtaattcagactccccatgaaacgctggacgcctttcagtgtcgtcgggaacggcaagtcttggacccccttcgcgattttaggggtcactcggatgccctcagcactaatctcgtgagagaggtacggaatggacaacttcccgaattcgctcttgggaagactcaaagagatattccagtaacgtagtcggaagagcaacgcgttcagatcctggcacagctgctcccaagtaggcgcaccgtgggcgatgtcgtcgatatacgagcttcgacccaggacagggcccatctgagagggagccgggatgttacgctgaaaacagtcatctcatccgtcaacactgaaagtcgcggtgcattttcacctgaaactctgggttccccagagttcaaccccaaaaagtccaagacatcttggtcgacatcagcttcttcctcaggggaaagccacagaaatccccacagacagttattgagaactgcctggtagatcagcggcgcgttcttgaggccaaactgcatcctgacccactggtagtgcccatagggaccgacgaacgcagagatcaacttggctctctcggacatcttgatagcccagaaaccactcgccatgtccaagctcataaatcacatcgccgactcaaagccaatcaaaagatcatcaataagcggcagcggatagtgtgagagcttgatgaagccattcaccacgcgatagtcgatgcacatccggatgtcgacgccattcttcttgaggacgatcacgattggagatgcccagggggacgtagaagtctcgatcagcccgttctccagaagcttcttcagaagttcatacaccttagtccacaggtgtggtgcaatggaccttggacgctgggcaacaggtttagcgtcgcctacatccaggtcataaaccactccacgggcaggtgggggagctgcattgccgtctcccaagaagatcttccgatgatattccagaattcgcctcacttggtcttccatctcgggcgccgttttcccagggactccaacatctgcctcctcgatcttgcactcaggggtcaagtcacgcatctcaggaagcataaccaactggtcacgcaactgagagagcaactcacttccttcacgtatatagaccgcaggctcgtagtcgaggtcctctgtcgaaagccgcatgcagcgctcatattcctgcttcagcttctccaacggagttcccggcatctctgagatcaggatatcccagtaatcttcaacagcaccctgagaatcgtcgtcatccacatcgaatcccagagaatcaccttcgtcgcaccactgaccctaagaatcactgccaacttcaacttgtaaactcagggtttcagcggccgtatcaccttcaggactcatgccctctggggttccgacagtctgcgaggcaacatcggtcaccgcctccttcagaacgtcacccaagtcactcgtatcaacagcaacatctcggagttcaggagggtcttcaggaggcactccttcagtctgagttgcagcgtcttcagcgaagcgcacgcgacgaggcttcggtttcctgagaatcgaggcaagcagtgccatgccggggctctttgcaggtcgcggcagaatcatcgtaggccactgatactctggggtctcgacacaggatggctccagcgcagccaggcgttccgcccgaagtctgccctcacgcgactgaacattctccagaataagagtctgccactaccggtacgcaaaagaaccagggcgcacaaagcgtccggcatgtgggaagaagccatactccacgattcgggcgaccggcgttctgttgtgaatccagacgtccttgtccgatatgttgaccaccttcacagcgaccggccaggatctcgcagcgtaaatcaggtgcgttacccagcggtcacctcgtcctgcccacacaacttcacgctgtgggttcttcggtccatacgaaatcttcaccaccttggattccccaggggccaggtaccaactacctgtggtttccacgggcatgtcgacacccaggcgatcctctggagtccatccacgcatcatgatcgcctcttcatccggaagtgtcacgagaccttcgcgaacactgatcatcactccagctgcaaacatgaaactcatacccagaagaacttcgatcccttcgccgatgttagcaatccagacatccaggagatatatcaccctcaaaccgagagtaatcttcacctgagcactagcaccgatgtacgtcggaacgcctcccatgccagacaccttggtttgcttgtgcgacttgagtgtgagtccgagcttacacgctaagtcgaagctcacaatattcacagtcgcaccggtatccaggagaactctcgtccggcagtcgttcacagcaccatgcaccatcgccacatcacgtttctttgggtcaggatcattgttttcccaccatccgtagcgctctccagggttcagcttgtactccacaatttcttcagagttcaccgacccagagttcgcttgttcagaatgctggttttcaggggaagtcatgaaatcctgagtcaaagtagtcatgcattgttggttatcttgggttcttgttctcagctccgggcctacatacactagaacacataactctggggccttcttcagcccggcgcgtactgggtccccacccagcgggcttattggtttgacggcctcccagagtttgcttcgccatccaggagtttatccaggatttggctcggcatgtccttcagtgcacctgggcgggcgagtttcttcacaacttccagtgtcttcccgtcttcacacggtttcccgagatgcagtttgccacagttctcgcacggttgcgcgcgacacaagtgagtcggatgacccacttccaggcagcgatcacacttcacgtctttccagcagttttcctctgggtgcccccacttgccgcacttctcgcagaacttgtcccaattcgggttttcgcggcgaggggaacggaatccagagttcgcgttcggtcctggttgggcgttcggtggacgccatcccatgttatccatcacgcgatagacctcgttcgtcagcgtctgagtccactcggcacccttcatactcgccagactcccagcgctaggcgtagaagcttcttctccagagatctcacgagttgaccctgaattcgcgctcgcacttcgggctgaaactctgggttcgtccgtgatttcccggaaacgcgcatgaatttcagggtcttcgtctgactcagagtcagagacatcgcccctagtcacatacacacgtccttgtcgcttcggcttgaaacgtccctgaggaatgttgtcggcacgaaagtcacgaactctgggaggcggagcatcatggtcgctgcggctccagacatcttcgtcctgttccagagcgtactctagatcagcgatactcctgaatctctggccctgcaacgacgtcttgaggcgcgtgtccctgagtttcgtgatgaacctccggatatgcttctccagacgcttcggagacttgcgaaaatcaatgtcagccttcccagcggcggaattcggacgataaaagaaatccagggcgctctctgagttcttcatctccatcgtgaagtaacgttcagagtacgacgagcgcgctttgcagtacttcttcctgaatgcagacgccaactccttccagtcacgctgagtgtgtttgggcaactggttgaaccagtcacgcgcagctcccgagagtttcaacttgagttcttgaattcgcatcttcgtagaccaacctccctgagccgccatgttcgcaaaacgctcccaccaatgcacgcgttccctgagtgacgccttagtatcgaactcaccccaagtattcgagttgatgtacggtctgaacgtcaggagcgtagtgccagcttgagccgtagaggccgtcgtcaggttaaccccagggttcccgtccgaactatcatccgaactctcagaggacgagtcatcatcgctggaatcggagcttgggtctgagtccgagggtggattggcatcctgacgcttcttcttcttctgccggtgtttcttgggtgcagagcgcttggagtctgctttagagtcctgcgaggccttagaggtcgctgttctcctgggatccgacgtcttccccagagacacaggctcgagcttgacatcctgcgtcaccttggtctccgtagcgccatgtccccgcttgacgcgcgcgattctgccggaagtgtcggcgggagtctgcgcgagggtcgctcttagctgggaggcggcgacttcggacgtgttcttcggatcagctgtctcccgtctctggcctgtgacacttgcgtttccgttgattacgccactggattcttggggtcgggttgcaacttcagggttctgagccactgacgaccccacaattgttgccaaatcaggggcgacgattgcgcgacgcgcttgaacttgggccaatgttgcacgaaggtcgcgcacttggtcggcgtggaagcgctggatattctcgaaagactcccgctctcgctctttctccgcctcaagttcttggaccttctgctccatagttgacatttgttccttccaaccggcgtaggtctcggtaacccagcgcgcgcgctccgagtcggcttcggcttcgtgctgttgccagcgctcggcgtaggcggcatccaggcactcacgctcaagacgtacagcttccgtgatactctgggtcatcccctgagtttcagtggaactcagggtctggcgggcttccacgttctgcgcacgccgttccgcttctcctcgggcgatctcagcgtggaccaagcgatccgtaagttcctggatctggcgacgcgcgtccaggtcacgttgttccctgaggcgctcgcgctccaaggcatccagacgttctctggcgagaaactcgcgttgctcctgttccatgcgggcctgccacttctgctgttgtcgcaagacgttcagctcgatttgggcggacccagacctcgcggacacggacgaaactgacccaagattcctgaatccactcgagcggctcgacgcagatgattttctggatttcgtcgagcgtcgagagcgcacctcgctcttagagctctagtgttgactccgctcatcggcgctgacatcccttggaccaccaaatccagcaatcggggcagaaaccctgagtttcggctcggaagtcgtggctgaaatcctggggagaccggccttcctgggtgcgatctctgggtcagagtgcaccgacgatgccatctcaacgtcatcttggtcgactgacacaatacgcgacgggatgactgtccgggtgacctgaaatccaagatcaccggcagctgcaaagccaccggcactctgggccacaagcactagagctccaactcgttgtccaagcgacatcatcgacgaagacgaagagctaccataagacgtttgaacgcccgaggcagtactctcatccgaagcgcgcgaggtaccgatgacacttggcacctagcgtccttggcttccgcctccagagaatcacgtccattggacatggaattcaggggggtgggattctgaagcgaggcaccagtcgaagacttgtacgctggaagagaggacagcgacggtgtagacagcgcggatggcgttgacgggacttgtggccgaggcggtccatgctgagtacgcttggatcgtggctcaccatcactcaaccctcgtgggctccgtgaaatcgtgagtccagtgactctgaatctcaggacaaactgtcggcccagtagatccgcatcgtagtccgtcatcaatagatcaccgtctccatctgccttgtggtagtccagtcttggtgcttgctcttgggcgcttggtgcggcgtgatcttcagagtttaccttgaaaggcacaccagctatcatcaatctccactcgaccagttccacagagatgaaattctgggtctcctccatgacagagcgcaccagactttctggaatcctggaagcacgcgtcgaagaccagccagggatcaaattgacaaactcaaatccggcttcgaagaacagagtctgcagaatggcgacgcattcgcgggtggtcatgatactctgaggaatcgtagtcgccatgaggtcctgagcagttccgacgccccaccgggcgaggtgaaactcagagatccaggcttcatcttgattctccagaggcaaacgtcacttgaggtagcctcccgttgcgtacgcggccgcgaagtatgagttggcatccggtttcggagtcggccactcataaacgacacttggcggcgtcaccttcccaggattcacctcttcccagcgtcgaacttcacgtcgaacgtacagcaccatgctcccggcgtccaacgctgcttctcctgattccggagcaggcgcagcaacttcccggatgtcgctttcaggcgtcttcctgggtgccgcttgcgaacttggcgctgaaactctgggctcaggtggtgcgaacccagaattcaccttggaactctgagtcttcgcctcctccttcgctcgcacgggctccgacttcacttccacaatagactcgtccgaagatgagaccaagtcaaccacctccgggggctcaaccgcattggcgcctccctcagacgcctgagcaccaccctcgcgggtgtgctcctctgggacttcaggaatccgcgacccagaattcacctccgtcgaaccttggaacccaggggaaacttcttcctcctgagtttgcgatccagcagcaggctgaccttggactgcagacgcctcgacgtccccacctggcactacctcgctctcgcgagcagccttcttcgccttccgagcatcgcggacgactgtttccaggtccttgtgccctcaggctccataccttgaacacgacgcgactgacgtgacgcctcaccgcgtcctccatcaccgcgtccactcttcttcgcccctcgccctccaagcatcttggtagcttgaagttgacgggcactcagcacttcttcaacacttgattccggtgaaatcctcgacaatcgaatccgggcacgcgcaccagctgaggcgaggccaatgaaacctttgtcgcccaggggggttcgtatagcgcagcccaagactgttccccaggggtagacccagagaatcgacttgagagtcaacagcaagaagatagacccagagattcgcagctgcaaaactttaaaccctgaaactcactcctcttggttggcgtgggtaccttgtgtaatccctgtcggctcgtttgtcttcgacagaacggcactccaccggttgaaaatgtagcctcgaagaagtgcgggagcgcacgtctacttcagaacgcacctccacaccaaaaggcaaacccagagaatcagatcccctgaaacccagaatatcacgaattcagggtccaggttttcagtcaactctgggacttggaactcagaagacaccttacccaaatgccctcctagctcgataaaaccaacaaatacagagtatacaaacactacaactagccgtcacttattgttttggacccttggacggtgggtcacacacacactaggctcactcgagtctgaaattcaggggcctagctcccctgagactcacacaaacgcgcaccacctccaataaaggaggaaaatacaatcactatcagttaccttcccttcacacaagcagtcaatacaaaatcctggaggtgactacctagcaccccagaataccctctggaataatatgaaatgggctaccacgagcacagcaagtggcccaaccaggatatggaatagatggatcaccccacgaagctcaaggccgtcgctggtcaccacctaactggacttgagtttgatggagcccacacagacggctgtccttcgccattgatgtgcccttagcgacccgcggtcgtagtctcgggtcctccggatttccgtcggcaggcttggccgaagtcacttgcgcagtacagggtaaaaggaactctgtttggtttttatcagcaacttctctctctctctctctctctctctctctctctctctcttcttcgggcaaatatcttctgttcactatgcttggggtcaaaatgtattgtcttgagtataccttgggatcagcggtccaaacttgcgatcggcttgcgaatccattgtcgcacggcgtcgaaagtgccaattgtgggtccttcgacttggtttagtatggtgcaggactccctctcgactcctcgaaagtatccagtctgtgcatccacaacggttcttcaaggtcacgcatcactttgattgcagactggcttcgaactgactcgagtccctgaaaaccaggtgacactcagggtcatcttctgaaatcctgggaattctgaggaatcttggggaactgtggggattcttgggtgttggctcgggaaacacttaagttcagtatagagagtctggatttatggtccaaacccagagaatcatctttggaactctgggtcacctgcactcagggaggtgaactctgggtcatcgtgcggcattctaggtttccgtgcggcactctaggtaacaaatctgctgcagtgcagactcgtgtgtatctcctcaaagccacacttttagtgggtttagcggcctcctgctcatgatcatggtagtagtgggttgattctcagggtaatttgatcctctggggcactctgagccacagcaagatgaggcgtactcattctccagagacactttccgccagactttaggcactcatcgtaagggaaagtccgcggctggactgagtgttctctgaaattctgggcgtgcactcccaggattcacacttccagccagttgggcccatctgcggtcagacgctggattcatcccgagaaatcacttctctgccacggtcgccgtccatgtcacacgggtacagccgcgccgtatcccagtcatccaccaatcagcatccgatacaaactccaggtcacagaggtgacggcacatcgtcggcaattttctggggaccgcctcgtgtcagtcgcgttcgccatgtcatgtcttggcggacgtgcaagaagttgggcgtatggacgccgactctcggatcctacgtgctttagcacgtacgagggtttcaaggaagagctcagacaagcgtttgagcccccgcaaaacgagttccggtcgagggcggagttcctcgacctgcagcagggcaagcatgatgtccatgcttacgctcagagagcatggtacttggtctcgaacatcgtgaccaatccgatcgacgaggcgaccaaggtcgtcacgttcatgaaggggctgagagatgggcctgtgaagacctatctcttccgtgagtacccgagtactctcgaagctgcaattactcttgcaatgcaggaggagtttagcctccggcaggctaagctgcatgcacatgtgccgaggccacagccacgcccggtagtgaggacgggaggcccagaacccatggacctctcgagtgctgcaactgctggaccccagcagtcgcagggaaacaatgtgcgatgctaccgttggggtagagtcggtcactttgcacgggagtgcacggcccccgtgcaccagcagggtggctatcgcggcggtgccgggcaccgtcgcagccaaacaaaaaatgctggacgccagtaggcgcggggcgccctactggtaatgcagttccgcgtgtcgaccttggacacgcgacactgaggactgcagcccccagtgaggttcatcctcactgcaagaaccaagatgacaagcctgaccttgtcatcctgaatgtgaactcgatgagagcaagcggctctctccgtgctttggtagattctggcgcgtcgaagaactttgttcgactgcgaagtctatcaaggcttgacttcgaggatttaaagatacctcgaagtatgttggaagtacgactggcaacgggtgccgtcgtgaagaccgagaagcgcatggtacgcgtgggcttcacgtatgaagattaagagtttggcgagacctttatcgtcctggatctggacgataagtttgacattgtattgggcatgccgtggcttgcacgacatgatccggtcatcgattgggagaagctcactctcgtgcgcttcggtcgcgacagcggaaccgtgagcgatggccctgttgccgctacgcacgcaccgacaggtgcgcgcgactccccactcgacacagcgcctaatgccgctgtcccggagcgccctgggcgcgcgcgagcacgcgcgcaagagcagctagcgtcggcgttgctgccgacagctaatgaaggaaatttgttgaccttggaggtcgacacccgctttcagcgaatcaggaagagtctccggcctcaaggggcacggataacgcaggcgagtcacacgcctcagccgtggaggctgacgcgaatctgattggatcaggtctggccaataacaagagccaaggtgacgtaacgccgtcgactccgggagtcgatggcttgggcgaatttgattcgtcggctcggggagccgacgcaccctccgtaatggagggctccgccaatggttggcgtcgaggtattgaagtcgcatcgactccgggagtcgatagcttggacgaatttgattcgtcggctcggggagccgacgcaccctccgtaatggaggactccgccaataacaggcgtcgaggtgaagatggcgtgtcggctccgggagccgacgctgcaggcggtgcggacggttgcaaacgttccgcaccggaaaaacttgcatgctgtcgtgcagccgggctgcacgacgaagcgccgggcgaccaagccgggcttgaagtcgctcgcccgcgggacgaacccgccggcggtactgaagaagaacacccgtccacggctgggcctggacgaggctaagaaccaagcggagccgggctccgcaaaacaagaagacggcgcatgcgaagatcgctgcgcaagtctcggcctggggccgagacgctacaaggaatgtctgcagggcagacggaggctgagaagccggacgtcgagacgttgaacgtcttgacgcgtacttgtgccgggttccggtacagggagatgactctcgctaaccctccgacgcaagcgtcggagttgacttcgcttccagtcatgagctggaagcgcttcgcgcgtgacttgcacgatggacgcatcgagcaaatatgcattctctcggacgccgagagaacgaagagcgagaatgaagaactgaggcagttcttcatggagaccaccactgagagcgaggacactctcagtgagaagacgaagaatgagcgctttgaagagcagagctgggactcgttgaaaacgagtccctactacgagatcttacgggggtacgcggacgtacttccggaagagattcctgcggagcttccgcaggataagggcatccagcacgagattgatctcgtgccgggcacgaagtactgtgtcacgcggcagtggccactgccgcgagagcaggttaaagcgatcgacgacttctttgagagtcgtcgcaaagctggacaagtgcgggaatcgaagtccccgcacagtgctccgacgttctgtgtcaagaagccacagggcggctggcgcatcgtttatgcgtataacaagttgaacgatgcgacgataccggcacagacgccgatacctcgaaaagatgtcatcatcgattagatggccaggagcactatctacagtgctcttgatctgcgcgatgggttctatcagatcctcatgcgtgagagcgatatccctctcacggctgtgagcacgccgagcggcatgctctgggagtggctagtgatgccgcaggggctgaagcacgcccctgcgaccttcaacaggtgcgtgacgcacttgttgcgctcggtgcgcgacttcgcaccgagctacttcgacgatgtgttcgtccacagccgggctgcggacgggatgagcgatgttgagatgccacaaggtgcacctccggaagttgcttgcgcttatgcgcaagtacaagctctatgagaacctgaagaagtgtatcttcggagtgagcgagatacccgtgctcgggtgtctcgttgggaagaacggtgtccgccctgaccctgagaaggtcagagtgatcaatgagtggccgacgccgtcgaacgtcaaggaactgcggcagttccttggcttggccacgtacttgtgcaagtatgtgaaggactacgcgggcatgatacgcccgctgtcacagctcctgaagaaggacgccgagtgggtttggactgctgagtgtcagcaggccttcgatgcagtcaagcgcggcttgactgaggcgccgatcttggcggtggccgaccaagatcgcccattccacgttgtgtgtgacgcatccgacttcgcaatcggatgtgcgttgatgcagcacgatcacgagggtcgtgatcgtgtcgtctactaccaatcgcgtcagctgaagccagctgagcgcaacccggtacatgacaaggagctccttgctatgaagtacgcactcgcgaagttccgagtgtatctactcggaagcaaaccgttcgtggtctatacggaccacgcgtcgttgcggacggctgtgaagtcgccgcacatctcgcaacggatggcgagatggctctcattcttcgcagagtataacttccgggttgagtacaaacccggaagactcaatgtggtggccgacgcgctctcgcgtcgacctgactactccacggctgatgccgacgtcaatgccattgacgccatgcgatcgagcaccccgacgtcgtcactgttggacgacgtgaaggtcgcgtacgcgcacaacgtggacgcaaagctcttgctggtttacggctcagcgccttctgaccaagctcgtcagaagctgccgaagcatcttcgtgctcgtgcacaccgttaccgggtgcacgacgggttattactctacagtgcagtcgacgacaacgcggtccgcgttgtcgtgcccaatgaccatgacctgcgactcaggatcatgtatgagtatcacgatgcaccgactacggggcatccgggccgtgataagacataccttcttctcacgcgagacttctactgggcccaccagtataaatgggtgcgcaagtacgtccgtgcttgcgaggtttgtcaacgtgtgaagcctgcgcctttcgcgcaggctcccttgcagtcactaccaactccacgggagtgttggcagtccatgtctttggacttcgtgttcggtcttcccccggacagccaggggaacacgggcgttgtggtctttgttgaccgcttcagcaagatggtacatcttgctgcggtacccgctgaagtgactgcgaagcagacggcgcgtctgttcgttgacgtggtgttcaaacaccatggcatgccgatcaacattgtgtcggatcgggacccgcgcttcactgcacacctttggcaagaagtgtttacacttcttggcagtcaactttcgatgtcgactgcggacaatccgcagacggacgggcagaccgagcgcgtgaaccgcgtgctcgtagacgtgcttaagagctacgctcactcgttccaacactggagcgagtgcctgccgatggcggagttcgccatcaacaactcggtgcatgcctcgaccgggcaaacaccgttctcatgaacgccatcaggcacccacgcctcccgagtctactcgggatggtggctccttccttaagtgggggaggatctacgactgcaacgcagcagccgcagaatgccgctgacacttgcacagtgtcagccgcgactacgcgcaagaagaacaagaagcacgcgtctgtgcagggcacagacgccgacaagagcaagaagaagaagaagaagaagaagaagaagaagaagaagaagaagaagaagaagaagaacgggtctgtgcagagcacagacaccgcgaagacgaacgcagaggccgggcctactgctagaaacgagctgaacgagttcagctcggacgcaatcaacttcgtgcagcgcagacaagccgtcattcggtttgtccaagacgctatcgcagcttctgtcgaccgacagaagctgaacgcagacaatgttggtaggggcaacactaatgaattcaagaagggttcattggttttgttagcaactcaaaacctgcctaaacatgcagtttccgacttcggggcgagcaagcttgccccgcgcttcatcgggccgttcacggtgttggcacggcatggcaacgcctacacgctagatattccacctagcatgcgcctccatccgaccttttacgtcgggcagctgaagccataccggcagcacaagccacctagctcggctggcccgaagcggaaaccccagcgggagcgaacctctgctccagcgcgtgaacgcgctgggccaagcgtgcgacgcgacctcccacgtcgacagagatgtccgacgcggtctgcgaggcctgagcaacttgagctctcaggatcgccacctcctgctttagagcggcgaactcccggctctgatgctgttccacagcagcgacccgctctttgagcgtcgggccaaggtcaaccccaggttgacacgtgttcccaccaccgccgcctccgatccgcgacgcccgcggctcaacacgctggattgttgagcgtattgtgaactatagtttcccgaaaacgaaccggcagccggttcgttatcgtattcgttggagagggtatccgccccaccaagatacatgggagccacgggacgtcctgctgcaggacgttccggaaatggtgagggcgtacgaagctcaccacgcactgccgacgcgaaggtagtgtgagcgctgtggtcacctacagcgcccgaagtcccacgatcgtcgcgttcctcacgtgccaagaacttggcacggagatccttgagactctcaggtacacgaatcgtcgtgtacccgtttaggtcgcggtcgctcaagcgcgccgcacccggaagacacaacgtgcactgttggccttcgggcacagcgcatggaataccagcgtccacagaagatctgtggagctgctccaacctcccgcgcgtcgagaatgtctctaagcgttcacaggcgtgcttaatccgctcacggtaagcagccagcttcttgttgaagttctcaacaaaagcattccaactttgacaaagtgcctgccactcaggcactttgctgcgagaagaggtcttcttgctggagaagtaccggagctcgtggaagagcccgatgtaataatcgcgcctttgattcgttaacggatcaaagtgctgctcctccgccacagcatcgtcgtggatgccgctgcatacgtacagcgagatttcatttggaggcacagtgttgcccacacggtctgcgatctctgacgcagacggcatccatggatcgcgcgctgctcgggcagcgcgcggagaacttgaagacgccatctcacgcggggagcttaaagccccagcagcggagagcggagtttcgctctcgccgcgcgaacgcttcgagctcgaagcgtccgagtcgtctccttcacgagggcgtctcgacccggcatgcgggtcgagactatcactgtcgatagactccttgcgcttgttgggagaggcctcgccctcttccatctctacgtcgtcactcccatagttaacggcatcgttgactgcagaggaaccttcgaggacaatctccgactgagttgtccccgacgcggcctttgcagcgagcgcgtcgcgctttgcctgctggcgctcatggtactgagcaacagagaggttgccctctgttacggcggcggtcttcttctgcggcgagctcattgcggaatgagctcgagttttctttctcccaacatgaagaattgacgaatggtcaatttcctggttgacgtgccgtgactcggtgcgtctaaccttgtgggggggatggtgtaacagggttacacgcacaagtggctacagtcacttgtaactctaacagatacgacgtctgttagaggttcgaaagactttctcgaccttggtgtagacacaccaaatgctacatacatttacgaccaccatgacgggtggtccatagagacttaggattcctattggctgagaacagcatctcttagccaatgaacgacatgcatagcattggaattctgccaaccagccgttggcagattcctatcttagaatcttagaatattacatttagaggaagtcagaaacataaaacaaaatagcagttttcattttaacccaaaaacattatttggatcgtttatttagattaatctatactcggagacccgagtataaataactctaagttaaactaagctacgcttcctcacatacacgcgcacacgtgtaagctaaagtagtgagccaaagtaggcccattacagttggggtgcaggacatattcaatccgttgtattttgagtccgatacaaaacggacgagggcgagcggatgcgagttcgaggctcactcagtgcattcaccaatcgccaacacccgccgattaggcgggggcgtgtctgcgcgagcgagcgaacgcgagcgctgcaacccgatattttttttcagacaccgcgcctggccgagccgaggacttagcgtaaggcatgagggggtggggcaggccgcgcagcggcgctccccgagcgaagcgagagaggggcgggccccccgaagtgccgtcgctaagtccgcaggcgagagccaacgggcgagtgtccgccctgtgatgtataagtccagtgaaacggcagctttgattggctaagttagctggcccagacttaacttagcccgcgagggtaggcttcgacacaaataaaaagcagttattgtgctttgcagataaaatgtcgaccggttttatggcctagatcgaggtaggccggtccacaaatcagggcacaaatcagagggggtagcatggacgatctcgatttacttcgatcgacctcgaattacgcttttgaaaacgcaaaaaggatcgatttaccgtagatcgacctcgttctactcaaatccaccagcaggtcgacctcgagccctgatttggattggcgtaggtcgagttattagccggcctaaatagatcgatctgtccctttctttgacctcgttttattaaatcgatcttgatttattataactcgaggagagctccaagtcaaaacgacaaaacgattgcaaatcacaatatttactgtaaaacagaacgggttaatgtaaaacgtaaattttatagtgggtatgtggtattttgcaggacacattccacgattttgcaggacctgttttatggtgcaggaccaattttctggctgcataaaatcgtccccggccggggatggatgtcacggccctcaaatcgtgaaaacctcaaagtgctccagggaaatcaatgccttgaatcccccacgaaatcgatgaatctggggttggtctcaatggaaagagggaggaataccctagcctaggcctgggcctaaagcgcacttctacaggccacgctctcgcttcacaggtaccgaaattgcagttttgggggatcaggtttcacctttcctctaccgtctctacgcccggactcggctatacgaaatcatgccagcacacacttagagacaccggaaaacacacttagagtctacagctttccggtgtcagtagaacttttcaccgagttcaggggtcattttgggagtgcttacgtacacagtttttttgatgggggtcgagggggtgaatgtgatatagaagaggaccaacggaggctcgcggttgcgaggagcgtagccgcagcaaacccgcgcggtaattgtggaggcgggcccagcgacgagcattccagcgagccgagcactgttctcgccaggtgagagaatctttttatcgcaggagcgcagcgactgcctttgcggagcgcagcggagcaaggccatttcccgcggacgacatccgtcctgcgggaaagtcgtcacattgtggggtgatgggctgcctatacaaactccaagatatcaccgaaaatagactgtgtacgtaagtcctgccgggtcattttactccgccgatgcatttcttcgatcgttcgttttcgcctcattggtgtctccgccggcgatggcgcgactgatccattccacacattcgtgtgattgttctctcccccgtgttgtacgctgaatctagagccgatgcttgtttacgaccgctgcgcactaaattctgttcaaagccgaagacgaactaatttttattcgatagggaccccgagtgtcagtctcgaggtacacaacttcaagaagcagaaattccagtaagttatgtgacgtaacttacgtcgagatcaacacgttcagcagcagcatcactagtcttgagtacaacttcccagtatttcttgatcaaccaagcctaagcatgaccattggcagcagcatccgccagcacaccacaggcaaattggcacagtagcttctggggccactgtgtttctttcgtggcttctttgggcatcatcaatacggtttcaattatcgccatcacgggcaaagccgatattttatccgggaaacggcaatctcccagacttttggggagatggtgtgttgtagcttcacgcccagtggatactcgggcgtgtggggcccggaaagcgacgagttcgcgcttgttcgtgcaggtagagacggagtggcgaggcagcatgctacagtaccaatcgctcggaaaaatggtttacacatggaggtaaagtatgtccaccgaagagctcttttatttagcgttagcttcaagcttgtcgtgccatgcttcgcgggttgtcgtcccaccaatccactccaacccactccaacccactccaacccactccaacccactcactccacgcgattgcgacttgaatgaatcccaggggatggacatcgaaaacagagggttccttcctatcttcgcactgaattcgtatgtacatgtattagagccccgtggtctacctcgccaatcgccaaaaccagcgatgtacacatgcgcatgcagggctaagcccctttattttgcacgcggcacacgctgcaccccaactccacttgtacttacatgaaaagtcagttgcaaatgattgggagcctgcatagacacagtatgatcaatgccacagcagtctcgactcgagactgtcgactaacgttcatgtgccggtacggtactggtcggactggggctgcgcatacatactacagtgcatgcatagactatgcagcatagtgagccgtcgttgcttcgtagttgagggcatttcgtgggatcgccgggggttgtatggctgagacaggttgagaattcatggagttcttgtaacgttacaccaaatgaggcgccgtaagaaggcagtctatgaatataatatgaatttgcaccacgcttcaggagaatctgacttgcgacgtcatttatacagcacagttttcacgttacagtttttttatcttcaagtcaatggcgtgtaacacgcaggatcttcgatttggatgcttttcgcgtgtttcattcccgcttattgatggtgggaattccacagcatcatcagatttcccatacaaaaaagttgactaaaatgcactgtggagattcgtgtacaaccgctatctctggttcgataatacaattttcctgtaggcatgcgtgtgctgtactgggcactgagagaactacgtcagctcgcccaaacgcgtacatagaatcattttttttgtcgttgtttcacagtacaagtacagtagatgggcaggctgtacatgtatcgaagccatggatggccctgtcctggacacgataagagcatcacgcccagcttttggatgggataaccttgtttatcctacgattacatacccggatccaagaacggctctcggagagagctgagacacaggggagcgtaggatcggggaagctatggttgggtggctcccgtatcaacctcaccgcaatgtggacgctacactttcgaaaacggcaaggacaagagacacaatgaagtttacattgccaaagaacgccttccccgtcgtggagctgtccgaggaccagcaaaaagcgctcgttgaagaggctgacaccgtcgtgaaggagatcgtgacagcgaatgacgccttcatcgcggacggaggcgtcctccgagatccgcagtggcgtctgatgcgcacgaaagagggtatgcaggtgtatcgccaacgcagaaaggcgatcaagcagcgagggaatgagtcgtccgctccagtgatcgagagtccgtcctggtcatccagccacacgctgtcaaggtaccgcacggagaccagcaaccttgttgagcccttcgacgaccgagagacgtcgctgtcttcttcatccgggatcgctgagaacagtatcatggagaaggcaaggcctcccggtgtatctttgatggccctccacggtactaccgacggcacactggacgactgcatgttcgggtgtttcgcccccaacgacgacgagtggaagctgcgcagttcctacatcaacgatcgactcgatgatgctcgaattgtggcgtctattagaggtccaacagaggaggacccctaccgtttccttggtatcaagtggtttgccaaagaacacccagtgatgctcacgggtatcgttcagcagcgagatttcctcatcctcgagtcctcggggttcacgcgcgactgcaacggcgagaaggtcggctacttcctgatgcactcggtggcactgcgagaaatccccgagctctcgcacttgaacatcgttcgcggactgatgagcttctgctacgtttttcgccagggaaaacctggcaaggtcgacatctacactcgcggcttcttcgattcccgtggtgagatgccaggccgcctttcagtcgcgatcgctgcggatgccgctctctgctgtgtgaatttgatccaatatgcgtacatcaagaagctgacgtggctgatgaagcacagcggccacgggcgatctggtggtcatgcgacgcaatctacgcactgtgaggcgtgcgagaagagcttctccaagttttcgcttactcattccgggtcgggtacggcgtgttccatttgccggcgggtagtgtgctccaagtgcagtgtgctgaaaaagatggtcatggacgtgtcggacactgggtccgtccagcactgctctctccagttctgtctgcgctgtttactcaaggcgaagaagcagtgtggctgggagattgcgctgagcgactctgagagtgtatcgcaatcgtccaagtgttcgggatcgggtgtagtgtatcgggttctaccgacggaaaacttcaggcgcgacggccgctcgcactcgaatgttacggactaccaacgaggcgacatgaccgcgaagtccaacagcgacgacaacgtcgatggaacgcagtttcaaaacagagtgacgcaattcccctctgcgagcgcggcgaggtttcgatcatggacaccacgttcggatgatcgctccggagaatctcaaactacacgaggtataagaccccgtttccttaattaatagaatactgtaatttacttataatacctttatctgtagcattatctgtagcactacatgaaattcattgttcatactgataaagtttgccggcatttagagtcgtctatcacacggccattacgaggtctaccgtctcaatgaactgtgcacactcactcagactgtgtggcgaatacgtgatgattcattttttttacgaagtactactaacgtactatccgacaagcaacgtggtgtgcaggccgcagtctctggaatatttcaagagaaacactgcaactggcgagtttgtaccctatcgacgctgtgtggacacaagttcgacattttgtattctttcgggtttgggggcaactagcagctaaggagcgcaatgccgaaactgagaagaccatggtggctagtgtgaagcggctttcgcgactggaaggcagttatcgcgccagtgtttaccgttgtaagtactcaacaccttctgccgacaccatgtaggaaggattcgacagcagctcgataaagaactccaagcaccgcgccacccgccgcgagtaatccagggcttgcatccaagtctgacaaccactaatgtcgacgtgcagtcactcgcacgcacgaatgtgatgaccaaagtgcagcgagcaccaagcaaaatgcaaaaatctatgcagacacaacgtgcacctacagtagtgtcaaattttcatgagacttcaacgagtgccaacgaccttcatcgatggattctcgccaggagccgattacctaacgtcaagacaacctgccccgtgttgaaaggcaatcaagcgcccatagtaatgtacactgtactgtacgagtttccggggaccacctgcagtggttgcgtctggtttcaataaccgcacgccaccagcctgcccgaagtcttttagtaaatttttaatctcgagtgcgtggcgatggaaagacggaggaacgcagcgccatgccatcgtctttcgctccgaagcaacaaaccaacgactcggagcttcgaccgcgcaaaatgggaggaggatagccgtcttcgttcgcgtggcacgtgcgtcagttccgtcgactggacaaccaaacgaaccggcagccaatacaaaatccagcaggaaaaagtggccagtaaaccagcaaaccattctcccccatcatgtctgcatacaaacgcccagtcagccgatgtaatccccgcacatccgagcgccatacaaacgccagtcaactgcccaaagttccggcacattttcgaccatgtgctccatcatgtctcggctctatcagaacctctccctcactgcaccacaccaccactgcactgtgctctacgcacgtacgtacgtggaccccagctctgcttcagtctcgaaaagctcatcagtccgacacacagacagatacccccgctctacccaccgctctaccgtcatgaaggtcttccaggttctcctcgtcgctgcgttggccgtgtccgccgtctcgggtgccacgaccacgaccgccccctccaccactgccactgccgcctccacttcgtcggctgtggcctcgtccagcgccagcgccgagacgtccgccgcgtcctccgtggcgtcttctaccagcgccagcgccgccgtggccgattctacctcgggctcgtccaacgtcacgtcgacgacgtccgaggagtcctcggctgagacggacgcgtcggtcaccgcggactcggcctccacctcggactcgagctcgtcggaggagtcgaccacggcgcagagcagctccggctcggccgagtccgactcgggccccacgggcaactcgggcggcgccatcgccccgcgctcgggctcggcgctgtccagctcctcggacgccataccgcacgtgacggccaccatgggctcggtcgccgcggtcgtcgtcgcgatcggcgcctacttcctgtaagttttaggcgcgttaggcagactccagtgacgtcgacggttctacggtacactagactactttctcctagtacaagccggggaggctggctgaatgtacagaggccgccgccccgtatcattaacacgtatatttccgctcccgattgagcacacgtcgtcgtcgctgggtgtttggtgttggttgagtttgtgtagaatgtccgtcctctgttgctggggtgccgtaggttgtgtcttgatgggaaagaggtgaattggagaagggagagaggtagggactgaagttcactgtcgatgaggagggtcatggtgacgctcgctggaattggggcatcaacatccgaacgtctcatctcgtatgaggaggctctggcttgagtatgtgcagaaagattgtgcaccaaattccagcgcgagcaggtaggccaagaaacaagaattggctctctattcggcacatttgcagcttggcgcgattctgacgtaacgaacgaaaaatgaaagttgccagaccggttgccttttgcacttgctgtaacattatgaaagctgatagcgggctcaatatgcacggcatatagccatcgtggatccagaatgtccgcgttgaaatcgaatcgcaagtagtttcattaaaaagaaggtaaagaattttaagaaagtatgttgttcaactcgcgcgttctactgcttgcgcgtcactcatccgagactttttgcgcgttaccgtatcccttagctgcggggaaagccattgggatggcaatgcagcaagtatcgcttccacaacattggacgtacggccccgtacagcaaatattgcactaattgcgtgctcgaagactcgcaagcgtgtggcgggattgcaccgcagccaaaacagctcgatcatctccacgtaacaggaaggaatatcggccttgctcgatagtggtctggttgctgtgatcaagcaggagcaccaccattgtcagatcattatttgccgtcgctatctccaatgcgttcttggtctcaaagatcccgcacttggcagcaagtaacttgatcatgtcaatacaccgacttgacacagcctcttctgctgccaggccaatggaggctccgagatcgagctggttctctgaggcaacctccagcagtagtttcaccacttctagctgttgatttgaggccgcaatcttcaatacctcgggggatgcatctacccaccagctccttcaccacaccaatggaccctttctccgaggcaccgataaaagtcgcttggatcactagcaagaaccaatcttctcggcttctagccattatcgtagggtgttccaggatcactttaaccatgtcggatcggttcgtttgcagcaggtaaactgcgatttcatgcacacgaaagctgcaccggtccaataaaaattgcatcgttccaccggaacattgttcgaccacagtcaacattgtaacggagtggtggtagccgcctttgagaagcatctccaccacatccaagtgtccaaattctgcagctttctcgatcccggaggcgatatgactcgttctgtccttgaagcctctgtcaagcagcagctgcacaacatttgtgtggccattctcagcaggggcgaggagttatggcagtaggtcgacgaaagcaagtccaccacagcaacatggccatgagcagcagcagcttcaagagctcggtcaagtgctgcgacttggaggttgttggactctaggaattgaaccacctccgcacagccgcccttcgcggcagctacgatttcctcttcaagattgcacttctctggataatgtttgtgaagccattccaatacgtccaagtggccattagccgcagcgccgacacccgtcttactggaacaaccttctgtcctcgtgttatttaacgttctgacgatatcgagtcgcccccgagtagcagctccatccattgcccccaccgttatggggcgtgacgctccatgaactcgatgcacccgtgaaagctcattgtacacggcgccatcgatggttgtcggcttcagcaggtcgtttatttgctccagaacatggggaagcgcctgcaagtccagaggaagagccctcgacgcatatagtaatgatgtggcctcaggcattctcccttagaaagtaaaagtgaagacttaccctttctgaaaaaataaccgagaaagttcgactggaagagtgttactttggtaatctatcacaaagctactagcttcaacacgggacttcgagcaccgactaagagctttgttcgagcccaatgcttgacatgaagagaacgatcgttcccacggccaatgtcgtgcctacgatgcctttgagggcgtcaacaagggtaggatgcctctttaaagaacgctttggtagccgctggactctttcggagaaattctttaaacttcgagggacttccagccgctcctctctcttcggcgttaccatgggcttcttggactcgcaccaactctgaaatggcgtgaacggcttcttctttttcggtctttggttttgggcccatttttttctgcgcccctgatgaaacgagtgacacgatttcctccttggtttgcgtcgttttcagcactgattgcatcactggcaactgtgaagtggtcggagcatgcaacaagtacgaccaccgcaaacagggcacacgtcaaacgcattgtcgactaacagtgctcttgagtccagtaaattgaggccttgttcggagtgtcggaagcaaaatgcgaagtgctgaacggttcgaaagggttccgtactggagacctcgaatgcagcgataggggcagggtcgagacgagatttgactcaaatcccgaacaaagtcttgccaataatggaatcttgagcgttgccatgatagcagaccagtacttcatcagtagtgtccaatatgtacatgtcataaaatgcaatcgctctattcgtcgaacgcctacaaaattcaagcgtacttgtacagcaggttgcagttgcaaacaattgcattcgaaaacctgaagcctcagttaatgtggctttacgttttcatcagcgtagttgttgtgacattaccctggtcagaaggatcccatcgagagcttttgacacgccaacgacgtgtagtatacagtagttcgccacgtgagaactgggaatggtatcatggtaagttgctgacgagcgcggatgtatccatgcgcgatgggatgaagatcaaggcataaccaccacaaaccaaccaacacaacagttttggctggcttcacggactggctcaaatcacgtaaataaacgtgatcggcacatcggtagcgtgttattaacgtctaacggtccccctttgactgataagcacatgctgaagtgcgtttcgcagtgattgcctttgaagttcgtaaagtcttggccaggttgtgccttttgtaggtaccatttcgtgcgtgcgaattaaaaatgcgtgtgcgcgtatacacaatgcactttaagtagcagatgcaacgtgttcgatcatatcagcatcactagtttcatcatcgcgcaccttctcgatcctccgcttcaaccacaagtccctcagttggccaggtgcgatgaccagaaagactcgcgccatcacggggtccgccatgatgtcgaaggcgtccaccatgtcctccgcgtccagctgctctgcatagcaactctgcagctcttggaccgctcgttgcgagggcgtgagctgctccttctgcttcttctgctcctctctgccccccaccgtctcaacctcctcctccagagaccctaaaagctgctccaccgtgctctcggccagcactaaactggtaccagggcccgacacctccgcgtggcgatctcggaagcgctggaaccactggatgccgcactctgcggcctcgggctccttcatctcgttggccttgtttaaaacatctcgccgccggaccttcacgcctgcgcgctgcatcctcgccatgaccagcaggatctcctcgtccacctccgccaatgggggtgcagcctgacgtgttgcacttgcacttgcacttgcacttgcacttgcagcaactgaagctgcgtctgagggtgagccctccccagcgggggccaaaagtgccgccatttgcacctgctgcctcctcttggcggccggctcgtaaccggttttcttccagtgcacgcggttcatcagcgtcgtgtacgggatatccgtgtctctgctcacggcggtggccgtctcccccgccagcacgcgagccacgcactgggccagcagctcctcgtcgtggcgcttcctcttgggggccatcgctgctgcgttcctgtcggctgactggtcggttactttcgtgaagggatttgtgaatatggggagttgagtatgtacgtaatttgtacacgaattatgcaacgtagagagtcggtattggaatggagagggtcagataaatactcttgaaccagttggcagtcaggagttctgccctgcgaccaccttgactaactcagctcctcggttgacatactaacaaacccgttactgtgaggtaccgaccttttgacaagaacagaaaatcctgtacgctgttgatattattttcccttgaaggcgtgtattgtcacttagttgctttttagcttactatagatagatatttgttctacaaaaaataaatgcttgaccaacttttgttagctcggatgcccgacatgggcccgtacagtactacctgtctaatgttcaatagcttttattactgtaacactgaatggctcgaaaatgtgtctgcgagtgtgataaatgcgtcgtgataaaacctcaacaagtgagttgcgccatatacagagatcagctcctattatacctatctaatcctgcctaacgaaaaaatggcgcaaatgacaataccgaatcatcgcgctattccgcctggtgcccccatcttctaatcggtcttgagttcgtgtgttgacgaacatggtggatacgtagtgcgatcgctgtgaatgctatggattttcaaagatcgaactgtctttcagagcctatcccaaccaaatgccccaatgtttgcttgggtaaattcactgtcttgaataccctggacaataatttccctttcagcttctccccccctttcagtgcttgaagtgaacaagcaccacatgaaagcgtttttaagtgttcacaaagtgatcacaacgaaacactgtagcagtctaaccatgctcaagaaattatcaaacctaactgattcactagtttcagtgataccaatttcgtttaatttatagacaacactgtagtagtcactacagcagctttcacattgaagattacttcgactcatgctttcgaggaattgagataatgcatgaatttactgtaagcttacggcccatctcgcaccaagccagttcctaatttctactcttgcttaatcaaagaatcgttagtggactagcttcgtaatgcgcaagtgacaatgcatgcaccttgtcttctctctacatgttcccggtgccccatctttaaaacggtcttgagtttgttctcgcgctatgttgacgaacatgatggatacgtccatcgaactgattcggtgcaaggaaagctattagctgagctcacttttccatttcttctctcctcgacaccttcgacacccacaagctcccagtttccagtacccaccatgcgtctgctactgtgggtgcttcttgcaactttggtgatgctactatccagcaccgacgcagcctcggccaagctttcaagctccgcttcggcgaagatcgactcggatatcccagttcgtggcctggttgctgagtacaaccacgtcggcaaaagaaaattgcggggcaatgagcttgtggcggaagatgatgacgatgaagaagagcgaggattacccgtgtcaagcctgctgaaccgctggaagtcttctctgcaggagatccagcgcactacatcgtacaaaatcaagaaatacctcgtggagaagttcttccgttggatttacagacaaggagtgaatcctgtgaccttgcgagccaggatgatggggaaagacaacaaggtcatcgggctgtataaggcctggtacgataaattcgtcgccgcaaacgccgttaagccttaaagtggacaacattgaaggagtgtagcagaagaaaacaaagttgttgttgcttttttcagttcatttgcctcctacgtaagcgtgtgagttgcttgctttcacttcaagatatacatagcccttcagaaattaggaaattaatcaaatccttttgtatctttgtatctttgtatcttttgttgtcgagcactcggcgaatttgtcgtatctttccttttcattccctcatgggtttagcacgaaaaagctctgaaatattgagggttctgtgttaacgctggagaagtttacgttgaagattttattatgggatagcagtccacatccgattatttgaagccgatcagatgaagcctcccgttgaagttaacacttcaacaataatggatgccttagactcagatataagatacttgaatgtattgaagttctcaaggtcagaacctctcaaactcaaagaaccacccaacaccgccgttcattcctgattttgccgattccgcgacctgcagaaaaaaaatggaggcggtgacctatcgagcgcattctagatgtgctgagtcgatgggtgccccagtcttctcgttgctagagcgaggacaaggtgccggtcgctaaaaagttattttgaccccgagaatttagttaactttttttaattattgtcgattttacagattggttccggcgtcaagacacagctacaggcattactctcctcggctaacagcctggcacgctgtaagaagtgctgccgtagttggaggtcttcaacgtttcatatcacttcactgttcatcggtgagtgatgagacctatcgatagatttttgttaaatcgtggaactaactcttttttggtttcgtgatctattggctttgacgctgcaggcaattgcttagccacagtcgccccaaacccctcggagcttcattggcgcacagcagaatccttttttcttcacgctgccggtgctcggttgccttagctgctgctttcgagcaaagcgagcgcaacaggagctcagggacatcaccaggctcgggatagtgggacgtcactcaaccgggacattgctgatgaggacgccgatgtggacatgctgctggatcagacgctgtacgaactcattcgttggctagtggcttgagcaccgcagatggagcacctgcagcacgacaaggcaaagcacagagcccttgatgagcggcagcggtatccgataatttgaacgatacaatgctttggactcagaagtgtagatactttagacgaagaagtttccgggtcaaggtgcgagactgctgttcttctgcgggcgatggccgcagaagaagcagtccttgcgtaaatcaagaactgcggcaactttagtgagtgcattcatcgaggtcacaagagcatcgtaacgacgtcgagattagtttgatcatttcgacagaacaagttcagcgcgtactgtgctatttcggagtcggagccgttaagtaattagttagtggtgttgggcagcgcaggaagaaaccagcactacgttacgtgctttgctaagaaggatactgattatctgcccatttgctcttgtcaacaacagacttccattgtaattgtttctcgctcgaccattgtgcgatcatacttactgtaaagtctaaaatgtggcttgctaagcattttattcaatccacggcttgatattatttgtgagcgaactaccaagctaccccagcctacgcaaagctctagtacactcccatgatccgtgaaaaaaagcggacaacagataaagtggggttgagatcgtcgcattacatagtgcgtttttactcaaatttggacttgttgattgattcatttcgagaagcaaactaggcctttatttgttgtgcgttgacgacttcaaggcgtaaagtagctcagcaatctgaatacggcaacctgaagcagctattttagctgcaaatgccatggatttcttaagatcgagttggttttccgagctaaccacaagcagcaaagcatcgtttgtgacctcttttgccgccgctaaacttccgcttcagggttgcataaagccggaaagttagactgtggagccgaactaattcaacacagccacaaatccattgggcgcagcaccaatgagcgcttcgcaggccttcggctcgggcgacgcggagaagtgcgacagcgccacgccgacgaagcagtagatgatagcctgcacttgacgatattgagtcgtccattagtagtgacacaaaatgcttgcgggaaaactgatggaaggatacacaatacaacattcctcagcacaagttcctggcttgataggcggtacttcctttcacatgaaaagaaaaaaaaagagataggatgtagatctttgttcctattaataaaaagaacgacaaaatttgcttagctcgttcgcggctcgtatctgtccaatgttcgataaattactgaatggtgactgcgagtgcgatacgtgcatcgtagcaaaaattgtttatacttcgaaatatcatctccatactacagatacgggaggtcactttcccgcaaaacctgccttggctgcagttttgaagcgggagtaccaccgcctgcgtccatttatggtgttgttatgtgtatcaccaagttgtgtagcatgctttatgacgcagcttcttcggctgtgaatgctatggatcttcgaagatcgaactgtctttcagagccaatcccaagcagtggctccagtgcttacttgggtaagttcacagtgaacgtcactgtctccaacgccttggataatacatttccctttcggtttctttcccacttcaatgctcgaaaataccacatgacgatttgacacggttcacaaactgatctgaagccgacaagaacgagtttatcaagcctaacatggtcgcttgggaatttaataagctaacgtagcctccacattgagcacgacttcgattctatattcgtgtttcgagaatctgaggtaatatatgaagcttagttttttagtttttggtgaggtacattgcagtcatttagaaaacctaacgactaagccagacggcatgtagtcactacattgtagtgtccatcttcatggcaggattcgatttttcatatgatgacacatgcacgagaaattagctacactagtttcccccatccttaaatcggtcttgagttcgtcctcgcgctatggtgacgaacatgatgcgcatatgtccatcgaaccaattcgacgcgaaggaaaattatctgttgagctcacttctcaatttcttctcttgtgtgttcagaggtcctctatttacgtttgtttaaactatagagtcctgatatcgctgtagactgggtaacctccagttggggtcatatacggtacagatctgagattggatctgacgtgctaaaaggtgttctgggggttgcacccccagacccccgcaaaaagaaaactaactccgagttgcggcaacgggtccgttcgctggaatgctcgtcgctgggcccgcctccgcaaataccgcgcggcccgcaccccgcgcgggtttgctatggctacgctcctcgcaaccgctcactgccgtaacatatgttttgcaatacaaaaattagtattaaaaaccgatccattctctgatctgtaccctatatgatcccaaccgggttttaccgtagactgggtagactgagcctaattgacaaacggtggtgcggcgaaaattgttcttgcaggtagtcccatagcttgacaggcaggtgctctcgaagtagtacagcattggtaaactgagatagttgtcgcaatttgagaaatcccctgatcgctttgtagatgcgtttggaagctggtttccatgctatcgagacaacgtctttgagcgcttggtgcgtggcattctgggctcgagccgacttgatcattggttgggtgccttggacacaaagagagactgtagatagttgagctcgctgctttagctgattcatggctcggacgatgatgtaacagggttacacgcacaagtggctacagtcacttgtaactctaacagatacgacgtctgttagaggttcgaaagactttctcgacattggtgtagacacaccaataggctacatacatttacgaccaccacgacgggtggtccatagagacttaagattcctattggctaagagcagcatctcttagccaatgagcgacatgcatagcattggaattctgccaaccagccgttggcagattcctatcttagaatcttagaatattacatttagaggaagtcagaaacataaaacaaaaatagcagctctcattttaacccaaaaaacattatttggatcgtttatttagattaatctatactcggaggcccgagtataattaactctaagttaaactaagctacgcttcctcacatacacgcgcacacgtgtaagctaaagtagtgagccaaagtaggcccattacacctggtagcactttgtagtccgtccaacgaccgactacctgagttcgttcgtcaccgcacgaacgcggagctgagaaccttcccatggatacggaggtgtccatggaaagctccactacgcctgcaactcacgttgcacgcgctgactgtccccacctgtcggacccagagtgggaagctctccaacgactgtcaacagtcattggtgaggcggctgtagctacgatgctgcgtacgctatcgccgacagagcaacatggtgttgctcagggattcgtcatgagggagcagcgagatgctgcttcgtctaccacggtgtcgtcggggacgacaccgcgcgcgcaatcgctgaagctcagcgtgagcaattacgttggaagagagggtgaacctctcctccgttggcttgtcgaacgcgacacagccattgcggctagacgtatcgccgacccgttgtcgtaggttgcgttcgccatgtcatgtcttggcggacgtgcaagaatttgggcgtatggacgccgactctcggatcctacgtgctttagcacgtacgagggtttcaaggaagagctcagacaagcgtttgagcccccgcaaaacgagttccggtcgagggcggagttcctcgacctgcagcagggcaagcatgatgtccatgcttacgctcagagagcacggaacttggtctcgaacatcgtgaccaatccgatcgacgaggcgaccaaggtcgtcacgttcatgaaggggctgagagatgggcctgtgaagacctatctcttccgtgagtacccgagtactatcgaagctgcaattactcttgcaatgcaggaggagtttagcctccggcaggctaagctgcatgcacatgtaccgaggccacagccacgcccggtagtgaggacgggaggcccagaacccatggacctctcgagtgctgcaactactggaccccagcagtcgcagggaaacaatgtgcgatgctaccgttgcggtagagtcggtcaccttgcacgggagtgcacggcccccgtgcaccagcagggtggctatcgcggcggtgccgggcaccgtcgcagctaaaccaaaaaggctggacgccagtaggcgcggggcgccctactggtaatgcagttccgcgtgtcgaccttggacacgcgacactgaggactgcagcccccagtgagggtcatacttactgcaagaaccaagatgacaagcctgaccttgtcatcctgaatgtgaactcgatgagagcaagcggctctctccgtgctttggtagattctggcgcgtcgaagaactttgttcgactgcgaagtctatcaaggcttgacttcgaggatttaaagatacctcgaagtatgttggaagtacgactggcaacgggtgccgtcgtgaagaccgagaagcgcatggtacgcgtgcgcttcacgtatgaagatcaagagtttggcgagacctttatcgtcctggatctggacgataagtttgacattgtattgggcatgccgtggcttgcacgacatgatccggtcatcgattgggagaagcccactctcgtgcgcttcggtcgcgacagcggaacagtgagcgatggccctgttgccgctacgcgcgcaccgacaggtgcgcgtgactccctactcgagacagtgcctaatgccgctgtcccggagcgccctgggcgcgcgcgagcacgcgcgcaagagcagctagcgtcggcgttgccgccgacaactaatgaaggaaatgtgttgacctcggaggtcgacacccgcttttcagcgaatcacgaagagtctccggcctcaaggggcacggatgacgcaggcgagtcacacgcctcagccgtggaggctgacgcgaatctgattggatcaggtctggccaataataagagccaaggtgacgtaacgccgtcgactccgggagtcgatggcttggacagtttgattcgtcggctcagggagccgacgcaccctccgtaatggagggctccgccaataacaggcgtcgaggtgaagatggcgtgtcggctccgggagccgacgctgcaggcggtgcggacggttgcaaacgttccgcaccggaaaaacttgcatgctgtcgtgcagccgggctgcacgacgaagcgccgggcgaccaagccgggcttgaagtcgctcgcccgcgggacgaacccgccggcggtactgaagaagaacacccgtccacggctgggcctggacgaagtcaagagtcatgcggagccgggatccgcaggacaagaagacggcgcatgcgaaggtcgctgcgcaagcctcggcctggggccgagacgctacaagaaatgtctgccgggcagacggaggctgagaagccggacgtcgagacgttgaacgtcttgacgcgtacctgtgccgggttccggtacaggcgcagggagatgaccctcgctaaccctccgacgcaagcgtcggagttgacttcgcttccagtcatgagctggaagcgcttcgcgcgtgacttgcacgatggacgcatcgagcaaatatgcattctctcggacgccgagtgaacgaagagcgagaatgaagaactgaggcagttcttcatggagaccaccactgagagcgaggacactctcagtgcgaagacgaagaaggagcgctttgaagagcagagctgggactcgttgaagacgagtccctactacgagatcttacgggagtacgcggacgtacttccggaagagattcctgcggagcttccgcaggataagggcatccagcacgagattgatctcgtgccggggacgaagtactgtgtcacgcggcagtggccactgccgcgagagcaggtcaaggcgatcgacgacttctttgagagtcgtcgcaaagctggacaagtgcgggaatcgaaatccccgcacagtgctccgacgttctgtgtcaagaagccacagggcggctggtgcatcgtccatgcgtacaacaagctgaacgatgcgacgataccggcgcagacaccgataccgcaaaatgatgtaatcatcgattcgatggccaggagcactatctacagtgctcttgatctgcgcgatgggttctatcagatcctcatgcgtgagagcgatatccctctcacggctgtgagcacgccgagcggcatgctctgggagtggctagtgatgccacagggtctgaagaacgcccctgcgaccttcaacaggggcgtgacgcacttgttgcgctcggtgcgcgacttcgcaccgagctacttcgacgatgtgttcgtccacagccggggtgcggacgggatgagcgatgttgagatgcacaaggtgcatctccggaagttgcttgcgcttatgcgcaagcacaagctctatgagaacctgaagaagtgtatcttcggggcgagcgagatacccgtgctcgggtgtctcgttgggaggaacggtgtccgccctgaccctgagaaggttagagtgatcaatgagtggccgacgccgtcgatcgtcaaggaactgcggcagttccttggcttggccacgtacttgtgcaagtacgtgaaggactacacgggcatgatacgcccgctgtcacagctcctgaagaaggacgccgagtgggtttggactgctgagtgtcagcaggtcttcgatgcagtcaagcggggcttgactgaggcgccgatcttggcggtggccgaccaagatcgcccattccacgttgtgtgtgacgcatccgacttcgcaatcggatgtgcgttgatgcagcacgatcacgagggtcgtgatcgtgtcgtctactaccaatcgcgtcagctgaagccagctgagcgcaacccggtacatgacaaggagctccttgctatgaagtacgcactcgcgaagttccgagtgtatctactcggaagcaaaccgttcgtggtctatacggaccacgcgtcgttgcggacggctgtgaagtcgccgcacatctcgcaacggatggcgagatggctctcattcttcgcagagtataacttccgggttgagtacaaacccggaagactcaatgtggtggccgacgcgctcttgcgtcagcctgactacgccacggctgatgccgacgtcaatgccattgacgccatgcgatcgagcaccccgacgtcgtcactgttgaacgacgtgaaggtcgcgtatgcgcacaacgcggacgcgaagctctttctggcttacggctcagcgccttctgaccaagctcgtcagaagctgccgaagcatcttcgtgctcgtgcacaccgttaccgggtgcacgacgggttattactctacagtgcagtcgacgacaacgcggaccgcgttgtcgtgcccaatgaccatgacctgcgactcaggatcatgtacgagtgtcacgatgcaccgactgcggggcatccgggccgtgagaagacataccttcttctcacgcgagacttctactgggcccaccagtacaaatgggtgcgcaagtacgtccgtgcttgcgaggtttgtcaacgtgtgaagcctgcgcctttcgcgcaggctcccttgcagtcactaccaactccacgggagtgttggcagtccatgtcttcggacttcgtgtttggtcttcccccggacagccaggggaatacgggcgttgtggtcgcttcagcaagatggtacatcttgctgcggtacccgctgaagtgactgcgaaacagacggcgcgtctgttcgttgacatggtgttcaaacaccatggcatgccgatcgacattgtgtcgtatcgagacccgcgcttcactgcacacctttggcaagaagtgtttacacttcttaggagtcaactttcgatgtcgactgcggacaatccgcagacggacgggcagaccgagcgcgtgaaccgcgtgctcgtagacgtgcttaagagctacgctcactcgttccaacactggagcgagtgcctgccgatggcggagttcgccatcaacaactcggtgcatgcctcgaccgggcaaacaccgttctcatgaacgccatcaggcacccacgcctcccgagtctactcgggatggtggctccttccttaagtgggggaggatctacgactgcaacgcagcagccgcagaatgccgctgacacttgcacagtgtcagccgcgactacgcgcaagaagaacaagaagcacgcgtctgtgcagggcacagacgccgacaagagcaagaagaagaagaagaagaagaagaagaagaagaagaagaagaagaagaacgggtctgtgcagagcacagacaccgcgaagacgaacgcagaggccgggcctactgctagaaacgagctgaacgagttcagctcggacgcaatcaacttcgtgcagcgcagacaagccgtcattcggtttgtccaagacgctatcgcagcttctgtcgaccgacagaagctgaacgcagacaatgttggtaggggcaacctaatgaattcaagaagggttcattggttttgttagcaactcaaaacctacctaaacatgcagtttccgacttcggggcgagcaagctcgctccgcgcttcatcgggccgttcacggtgttggcacggcatggcaacgcctacacgctagatattccatctagcatgcgcctccacccgaccttttacgtcgggcggttgaagccatacctgcagcacgagccacctagctcggctggcccgaagcggaagccccagcgggagtgagcctctgctccagcgcgtgaacgcgctgggccaagcgtgcgacgcgacctcccacgtcgacagagatgtccgacgcggtctgcgaggcctgaccaacttgagctctcaggatcgccacctcctgctttagagcggcgaactcccggctctgatgctgttccacagcagcgacccgctctttgagcgtcgggccaaggtcaaccccaggttgacaatacccggggcgtgttcccaccaccgccgcctccgatccgcgacgcccgcggctcaacacgcaggattgttgagcgtattgtgaaccatagtttcccgaaaacgaaccggcagccggttcgttatcgtattcgttggagagggtttccgccccaccaagatacatgggagccgcgggacgtcctgctgcaggacgttccggaaatggtgagggcgtacgaagctcaccacacaccgccgacgcgaaggtagcgagcgctgtggtcacctacagcacccgaggtcccacgatcgtcgcgttcctcacgtgcgaggaacttgacacggagatccttgagactctcaggtacacgaatcgtcgtgtacccgttttggtcgcggtcgctcaagcgcaccgcacccggaagacacaacgtgcactgatggccttcgggcacagcgcatgaaataccagcgtccacagaagatctgtggagctgctccagcctcccgcgcgtcgagaatgtctcgaagcgctcacgggcatgcttaacccgctcacggtaagcagccggcttcatgttgaagttctcaacaaaagcattccaactttgacaaagtgcctgccactcaggcactttgctgcgagaagaggtcttcttgctggagaagtatcggaactcgtgaaagagtccgatatagtaattgcgcctttgattcgttaacggatcaaagtgctgctcctccgccacagcatcatcgtggatcccgctgcatacgtacagcgggatttcatttggaggcacagtgttgcccacacggtctgcgatctctgacgcagacggcatccatggatcgcgcgctgcccgagcagcgcgcggagaacttgaagacgccatctcacgcggggagcttaaagccccagcagcggagagcggagtttcgctctcgccgcgcgaacgcttcgagctcgaagcgtccgagtcgtctccttcacgagggcgtctcgacccggcatgcgggtcgagactatcactgtcgatagactccttgcgcttgttgggagaggcctcgccctcttccatctctacgtcgtcactcccatagttaacggcatcgttgactgcagaggaaccttcgaggacaatctccgactgagttgtccccgacgcggcctttgcagcgagcgcgtcgcgctttgcctgctggcgctcatggtactgagcaacagagaggttaccctctgttgcggcggcggtcttcttctgcggcgagctcattgcggaatgagctcgagttttctttctcccaacgtgaagaattgacgaatggtcaatttcctgattgacgtgccgtgactcggcgcgtctaaccttgagggggggatggtgtaacagggttacacgcacaagtggctacaatcacttgtaactctaacagatacgacgtctgttagaggttcgaaagactttctcgacattggtgtagacacaccaataggctacatacatttacgaccaccatgacgggtggtccatagagacttaggattcctattggctgagagcagcatctcttagccaatgagcgacatgcatagcattggaattctgccaaccagccgttggcagattcctatcttagaatcttagaatattacatttagaggaagtcagaaacataaaacaaaaatagcagctctcattttaacccaaaaaacattattcagatcgtttatttagattaatctatactcggagacccgagtataattaactctaagttaaactaagctacgcttcctcacatacacgcgcacacgtgtaagctaaagtagtgagccaaagtaggcccatcacagatgagctgaatagccatactagtttccgtgactggctcgttcttttgggaaaattcaatggcaattatttcttgtgggtcgttccccaacaccacccaaatacctcttcgccctggtaatccttccaatttcacagagtaaaaagttagagtccagcgctgaattgcgacggcctgtctgaaggttgaattgccaagaaaaccgcgtagcactggtccaaccgaaactcgcttctttggttgctggacgtgaagccattccccggatgactgcatgcgtctcgaaatcagctgccttccacaagattcgcttagcttcttgtggcggtacttgatctccgtcaaagacttctctatttcgtatcagccaaagcgtgcattgagtacatgtcgtccaaatcagccacaaaatcctcatagcttcatcctgccctttcccccagcacgaaatactcttcatggcttcgtcaagaaacgttggtgaaagaaacctcaggcggtcttctggctgcaagatgcggaaccagtgatgctagctcgtctcgatgcgggtagtgtccgatccattggtataatgttggaccacgaagtgttcggagttgctgagttgtattgagcaaaatacagaatgagcaaaaactaaagaagcaaagcaaaagctaaacggagacttggtcaaaagctccgctcgtaaacatacagatggagattgttacgcggtgggtccggtcacagcgccaccgagtgcacgccgccagatgcccgccatcagtcacgtgaaatgcaacgcgcaacttgtttccgcacttagtctgctcctggacttgcgtctgaccgtgctgtttcgagactgatctcctactcactcaatgcagtgtgactgcagcaagtctgtcagccactcatactacttcaacacctgtctgctgctccgcagcttctcctgtcctcgtccctcctgcttggactcacgctcttgttgtcgctgctagcgacacctccgttgcgccaacggctgcaaccggagccgattcctaacagagatcagtgcgcacgctgggtagcagccagcaccgatggcaggaacacgacttgaagttgaggatgccatcgcgcagcaactgggttttgagaacattacatcctccccgagtttatctgcgtctgcgggtcggcggagcacggcgctgcttattcttgagatccttcagcagtgcgtcccagtggctgacatggttgatttcatcttcgaactcccaagagttctcgctttcaggcagatccacccatgagcagaggtactgcttgcgtccaccttggcgacgctggtccagtagtgctcgaataacatacactctttcgccatcttcgtcatacatgcgaggtgcgcttttcgtgatctggcgaccacgaaaaatctctgggacgttgacagaaagcttgagttgatccacgttgaacgtagcgtgacgtccacgggcaaggtaacgatgaggcagagcgacacggtatgcattttcactgatgcgttccgccacaggaaacgggccgtaccacttcggcagtagcttgttgcaggcagggtcgcgctcggggtcgtaatccggttggccaagctcactgcttaggacctgagcatccacgtacaccaaatcaccttcgttgaactgcacttgctatcgcccacggttgtagtagtgcgcctgacgttcttgagctagtcgcatgttgcgctgagccaactcaatcacttcctgccgggatcggatcatgttctgtgccaggttgccagaagttgccagaactatcggtgagcgaggtttccgtccacaatctacctcgaacggggaaatgcgagttgaagtcgacaccaacgtcgcatgcgcgtattccacagtcggcagcatcttcacccaattgtcaccataatgagagacgacacaccggagactgtcctccaacgttctaatctgccgttcgctacgtccgtcggcttgagctcgcttcgacacagtcattcgttgcttcacctacatgatcgtcatcaactcacgccagaactcgcttgtaaacttggggtctctgtcggaaacggtggagtcaggaagagagtagtagcgcacaacgtggtcgaaaaacaaacgagctgtagtcttggcgtcgacatctttggtagtcggaatgtagcaaggtctgttcgacagccgacacacgaccacatagattgcgtcaaacccctcactcagtggcagtgccgtgacaaagtccatagtcacgtgctgccaacagtgttcaggaaccggaagcgactgcagcagacctttgcgccgacgagatccagacttatggcgcacacaagcttcgcaagttgaaatatgctgggcaatatgctcgcgcatgcctggccaccagaattactgacgcatcgccaccattgtccgctccacgcctgggtgcagcgtcatgaaagtcgtgcatcaatcgaagtaaaatcgtatccacttgaggaacacggagcacacgtacagcatccggacttttcatcacaagaacgccctctagaagctcgtacttctccgaaacccgttgctcttggcgttgcagcccttgtatgatggaaacgcagtccttgtccttcgcgtacgccgccttgatggctcgaacgaactgcgcatcctcccccaccaccaaaagcgatgcgtgcccgatgcacgttacgtccatcagtgacgcgttcgatgacggcacagcagcttcggttccctcgatcaaaagcttggcagctcgagtaggaaatcgtgtttggaagacaaacgaaccaaccgtcgtgacgcatactggtggtcgagagagagcatcggcgacgacatttgacgttcccttcttgtgcacaagttcgaaatcaaactggccgaaaaattcaagccagcgagtcatcttaggagacaagttggggtggtgcaagaaccaacgcacgcagagttgtcggtgtggaccacgaagtggcctccgagcaaatagcatcgccatcgccctagacagtgttttatcgcgtagagctcctgttcgtgcgcggcccacttgctctccgtgtctgataacttgcggctgtagaaacagactgggtgatcaaaaccatcaacttgctggctgagaacaccacccacacacgtcttgaagcgtccgtcgtgacttggaatggcatggtcatgtcgggtaagcgcaagattggtgccgagatgagtgtcgtcttgatagtgttgaaggccaattcttgttcagagccccacacccactccgtcgtgctcttcagtaagtcagagagaggtagaacgagatcagcgtaattttgcacaaatcgtcggtagtacccagcgagtcccaggaatcgttgtaagtctttcacgttttgtggtcgagtccagttcgcaatcgccgctgtcttgtctggatcaacacgaactccttccccactgacgatgtgtccgaggaaacggatctgaggctgagcaaaatggcacttactgggtcttgcgtaaagttgctcgctccgcaaaatctcgaacacgtgacgcaagtgctgcaagtgttcggctcggttcttggagaacacacagatgtcgtccaagtagacgaccacgaacgcagaaagctctttgttctcgaagatccgccgcattaagcgcgaccacgtgcctggcatacctgccaggcccatgggggccacgcaccactggtagatctctgacccagcgcgaaaggcggtgtattgacgtgagtcaaacgccattctcatctgatgatatccggaggctaagtcaataagcgtgaacacacgagcgccagccagtcggtcaaagatctcgtcaatccggggaatgggaatacggggaatgtctgtagcggagttcacatagcgataatcaataacccagcgcacgggttttgaaggatcgccaccccgcacccattgaatcttcgtcggcagctcgccagtcacgggatcgcgcttgggtacagcgaaaatgttggagacccacggggacgagctgcgttcaatccacttcttctgcaaaagcttgtcaacaaaaacttgtaaggctgctttctcaacgtgtgcatgccgaaacggaggtctggaggacgggactgcaccttgcttcagttgcacggagtgctcaatgtctcgctcgggtgggagtccttccgggagttcctcacgcagataatcggcgaattcactgactaatgccgctacatcagcatccggtttcattttgccttcatctgtcacgacatcgaagtggaatacttcggtgtacatcccggccttgaaattcgtccgcgtctatatattcgatctcttgtttagaacccggaggtggtgtccattctcgaggcaaattacggcgaggtgggtgtcgccacgacacagtgccagccgcccagtcaatatcggggttctcacgacgaagccacgactgaccgagaatgccgtcaaagtcctgtcgtaagggccactccaccatctcgactggacataagcgatcttccaccgtcatgtccaccgtgaacttcttcgaggtagtcacggacagtcttccttcaaagtcgcgggcctgaatcctttcttcccgcgtcccagcaggagccactagcagatcgcgtcgcacaatgctgtgtgtcgctccagagtcaaccaacattttcagacgtcgcccttgcgcgagagcttccacaaataaaagcgccatccatcgcccctactgttaggggtcgtgacgttccatttattggagaaatacgcgagagtccattgtacacggcaccatcgatagtactaggtttcagcatatcgcttacctgttccacaacgtggggcagcgcttgaaggtcgaggaagagccgtcctgacgaatagcagtggaggtgactcggacatcttttcgttttttttcttgtgtgaagaaaaacttgcaaataaaaacaaaaagacaaatgatggaattagacgaagaattcggcaaactagttgattgacagaatctaacatcatcgctgataaggaaatcaccattcacaacaagccgtgatgaaggtggagctgttgtgcagagttatggggagagacccccagtttagtgtggagattgggctcgacgacagagtggagaagctgaggagcgttattgccagcactcgagaagtggatctccacccgagcgatatcgcgctttactgggatgcttacaaaacctacggacccagactcgagatgtgcgacggcgtcagcgtgaggtcctttggtccggacttttctcctctacccaacaggcctcgtattcacgtccatatccgtcatggaggtgtgcgtcccagcaaagccaacgtgttggaaccagaaggaaggctcgatggagaagacactggtctgagcggcctctggaaattttcagaacttaaattgttacggtttccctctccgactcaactggcctcgcatctggaacggcgcctgccattccgagtccgcattaaagatcagcacacggctgcgaagatttttgccaaggatggcccgcagattcgctgcgatgctctctcgtcgctgattgacgttctggttatgacttacgaggcttcgctggatgaagaggatacgaagtgttcatgccagaagttcgacgacctattgttcgctttgatggctcagatttgtcacgccaatggcgttcaattgaaggtggagcgtaaaattctcgctgacgatgccggtcctggggcagatctgcggtcggatgtcacgatgtactgcaatgggtgtgttgtgctctgtggagaaaaaagggatggctccgcggatattcagcgcacattttcccagctggagccaaaaatgaagtgctggaatgcaaacttttacggcgagctcccgtacattttgggctacgtcgcctgtgggaaccgtcgacaattgtcagcattccgattctctagtgggaaacgctttcaggatctctctaaggtttcgtcgacgattgcgatcaaggttttctacaacttggctttcgttctaaggtatatggcgacccagtcgaagctgacgactcctactcagctctcaccattcgaaccccatcaaaccgacacggggacaatcgagctggtcgacggcatagtcgatggcacgattaagcgaactgtacgacgcgatcgctgtgcgagcggcggtgactacaagagaattgtaggtgtctacaaaaacctacagagcttaaagtggccctctgaaagtgcagaatttcaggcaaactctgtttccatcccgtacgatcgcggtgcagttgtatccgacgggatttcgccgtcttcctgaaaatgtggaggaagtgaacaaatggctggacggtatgctgtgtgcgttgcaaagttggcatgaaagcggctactgccacggtggcgtgcagtggagtaacacagtgtatgtccccaggcaagaagtcactgaacataacgcccttcaggagcctgggtactggatgctggataacatggagtcgtctcgtccgtcgagtttgctgatccgtggtcatgggtatgcagggaagttcacttgtcagtacgacttgttccagctgggaattttgatgagcgagctacacaaacacaagttcccgttgccacaccgactgctttgggtgcgggacaagctgctcgtagctcgggacacgtctgaacaagtgacggccaggaaagtgctcgagatgctgcgtcagacgaagaactgccgatcggaagacctgcagaaggtagccaatgtgcttctgtcggcgcttcacactcctgacgtgacggctgactcggtgctgggtatgatgaaggctttggtgccgcctgcacaggcgaagtattcgaagccgagtggggaggaaagttaagcctcttcggtcattctccttgcgattgcaaacttttcatctgaaggatgtcgtagtatttgtttttgcttattacattcagcgcttaccagcaaagtattgtgaatgaaacaaaaacagttagtgaggtcgattcccccctttttccaagttgaagtagtctggaaacattggaacggtatgcgctatctgggggagggattctcctccgttcacagtggtcgttggactcgacgacggagtggaaaagctgaagaacatcattgccaagactcgagaagtgaacgctcacccgagcgatatcacgctctactgggtcagccacagtctggctggactcgaaatgagcgactgcatgaaagtgaggcgctttgatccggacgtttctccgcaacgcaaaggacctcacatgcaggtgcgcatccgctcttccagcaaggccccggaagcaaaagtcggcccactcgttggagaggacgtcggtctgaacggcctgtggaagtactcaaagcttgacttcacgctaccgcagctatcctctcgtgctggattcagactgtcgtcgcatcttgagcggcgactgcccttccgagtgcgcatcaacgatcagctcactgctgccaagatctttgccaaaaatggtccggagattcgttgtaatgctctctcgtcgctgatcgatgttgtggttttgagttacgaggctggactggacgaagaggacacgaagcgctcgtgtcagaagtttgacgacctgttgttcgcgtttaccgctcagatttgccgagttaatggggtgcaattgaaggtagaacgcgaaaatcccgatggagatgcaagtgtcgaagaaaagctacgggcggacatcactgtaaactgcaatgggtgcatcgtgctctgtggagttgagaggggtggatctgcgggtgacagccgcgtcaataccgagctggagtcaaagatgaagtgctggaatccattgcattacggcgagctcccctgcattttgggttacgtcgccatcggcaacaagcgacagtggtctacattccgattctttggtaaagaccgcctccagtatctcggtcgagtttcctcgacggaggcgatcaaagtgttctacaacttggccttcgtcctgagccgaatggcagccctgtccaagttgaccgttcccactccgctctctccgttcacgccttaccgcagcaaagtgggggttatccagctagtggacggcatggcccagctaacgacaagtcccgagcattttcaagatggtgacgactacaagaaactcgttgaaatctacagaaaccgcatgaggttgtccgcgccaaatcttcaaagcgtgaggagcttgaagcaaactcgcttccggacacgccaggccgtggtgcagttgagtccgatggggttttaccgtcctcctgagaatgtggacgaagtcaacacgtggctgaaaaatatgctggaggcactgcaagcttggcacgagagtacggcgccattaagtgggagaacgtggcgtatgtccccgcgcaacgaattgatcagtggggttatgaccgactgaagcccggttactgggtgctcgtcaacttggagtcgtcacgccggtcgagtttgataacccttgtcggccctggcgttgatatgttgcacaattgccagtatgacttgaagctgttgggctgcttgatgaagagtctggaattccccttgtcgcaccgactgctgtggattcaagacaaacttctgtcggctcgggacaagaccgaagaagtgacggccacgaaagtgctggcgatgtttaaccagacgcagagctgccgaccagaagacctgcagagggtggccaacgtgcttttatcggcacttcacacgccggagatgacggctgagtcagtgctgaagatgatgaaggaactggtgccacctgcagaggcgaagagtgcggagccgagtggtgagaacaaaaaataattactgtaagctctgttgctactcagaagaccacggaaggtgcagttgctggacaaggttagtcgaattatcggagtgcaattttcgtgcagctggcgtagtgcttggaagcttacaaacagcgttacttttcaggtgcaggttcaaatctacacggtccatttcctgctttaactaggccgcaattgacctcactcaacacactcacgtctactaacagcgctgcgccacccttcttcaccacgatggctgcttctatccactgccacccgttttgcgttgtgcttctatcgcccactgcaggtgcttccttgacttgagagcccacactcttcgcgacgacagaatatccatcagttccggcgcgtcgctcgccttgcacgcgccgtaggactccaatctcgcttgtgctttgtgacatgagtgcggattgctttcagtttttctccttctccctgccccctaagtgtacgtcgcgcctagaaggcggagcgtagtgtaatgatgatgtggcgatggcgtcacagtgtgatgataatgtgcttggtctactcggcggagctctggagccccgcctgctgcttgtgcgtctgcaggttcacctgatcgcgcacttgcgacgccttgtgcagcagctgaatcatctgctccttaagcaccgggtcttccttgggccgatcgcggccctggacaaccatggacgtctcggagtagctgctgagcggcaccaggtccgaggagccagcggccgcgttgttggtaatctggccgccgttctgacgggccggcacgatctgcgaggacgccgccatggcccgtgccaccttgttctgtgcctctctccgctcctgaaccatgaccatggcgagatgtgccaaattctgcatcgtagcgatctgcgactcctgcagcgactcgcgcggcgccgtgtccagcacgcacacggctccgacgcactcgttgtccaccgtgaagagcggcgcgccggccaagaagcgcacaccgagcgggccggtgacgaacgggtttgtcctgaagcgcggatcgcgcagcgtgtccatgaccacgagcggccgctggtcgcgcaccgggtactcgcagaagctgaagtcgcgcggcacctccgactccttgacattgacggcgctcttgaaccactggcggttctcgtccaccagacttacaacggcgtacttgcaggccagcgtctgcgcggccaggtcgcacagtgtgtcgtagatgtccacctgctcctccatcgtgctcgtgtccttctgctgggcgtcgatgtgtagccgctccattagagcgttgaccatatccttgctctcctgatctctcgctgcgagctgctgcaaccaggcgatgcccacgaggtcgggcacagtcgacacttgggcgccgggcagcgccagcgcgtactcctccactgcatctctgaggacgctgttgtccacgccctcaggcagcgccacgccgtccggtttgactccgttggccacagcagccaccgccgccgcggccttgaggttggcctcctccttctccttgtccgccacagaggccgacgtgccgtccatgcaggccttgcacacgcgcagcgtagtgagccccacggactgcagatccacgctcttgtagacggagcagccgcggcagatgatctcgccgcacgcgcggcagtggtgcttgcgccgcgtgttggtgaacgtcttgaggcacaggtggcagcacgcgcggtccttgttattgacccacgtgggcacgcggcgcttggtgagctccttggagatgcggcggcggctgatagcctcctcgatgccgcccacggactcggcccagtgggccagcagcgcgcggttccagcggcgcttggagcgggcgccgggcggctggcggatgctgcagacgaaggtggcctccacgacgccctcgtccgggtgggggcggaacacgaagccgcacttggacacggacgcgcgctcgagcttgtgcgagtcgtagagcgacgggcactcggcctggtcgatggactcgtagacgcagacgcccacggggggcgcggccttcttgctgctgccgccggaagaggccgagccgttgaggttctggcgcgggccgtccacgacgtcggccgacacgacgcccgcgtactcgaggaagcagaagtcgacgcccacgtggccgccgaggctggccacgctcttcttggcgcgcgcggccgtccacttgatgctcagcgcctcgctctcgttctgctccttgtggaagagcacggcggcgtccgcgaagaactcgcgcagctgcagctgcatgagcgagcggtagtcgggcgtggtctgcgccaggaagatgtccatgacgtcgtccagcgacgcgcgcacggtgcccacggcgcgcaccgagtaggtcagcccgcccttctgccggtcctcgaacagcgtcacgcccttgcgctcgtgcaccatggtccactccacgtcgggctggcgcaccaggtcgggcacgagcgagcgcccccaggccagcagctccgcctggtcggcgtccgacagctccggcgccttgaagaagccgctgcgcagcggcagcgaccgcaccattgtgttacaatccttaacctgacacggacgctgcacggcgagacttggccggggtaaagctaaatggagcgggtcggcttgggcgaggacgccagcggtatattgggggcaagacaggcgactggccctatcatagggcccctacagtatgtctgtgttgtgcggtcgaggtgtgtaacactgcgggtcggacgctaggtgtgctggcgacacacgaggccggctgcggccaccggacgcgcgcgcagcttttttgcaacagtgaagtggcgaatgtaccgggaaatgggtacggcgtaccatccttcgggccctccctgcacaaagcgatctcgccacgcggcagcttcaacgcgcgtgggctgaaggactgaaggtgagttcggtatcaggctgtgagtggcacgccggcaagcccggcgacaagtgaagtagaattcactgcgtgcagttcagtcgagcgagtatgggttgatttctggagccaaccgtctatgcttgtcgaggggtttcagtgcaactggtagcacgactttataggacagcagcgaattcaaggcgagtttactgtactgcacacgttattcgtgtacatattctcgggggtacagaaacaattaggctcgcacgacgacatccccatgctgatggcgtctcacttgggtatgtacagtagtccatacggcacttgcaattgctgacgaaaaggcttggcctggacgacgagtctccctctctctcatatgcgcgcgcgaacgacgctagatccatgacatggcaccacttttgactcgcgacaaaagcaaggcccaggtgttgacgcacaccagccgacattccagaatgctttttacgaatacttaggtacctttagaaacgaatacgaagggccgatttattataataatagtacgcagatgtctaacatattcctggtgaaaggtgtcccgcacggtacttcccacctgagttcgcccatagtgcgtcgattcgcgccatcatgccttattgtgtccgctggacgcgcatagcccggacgcgtccagcgacgaggctgtgtctgagctccaccagcactgcgagcccctctcgctcccgcctccccccttttcctccgcgatagttctgccgttcaggcaggcactcctaaagccaccccgaggggatcgagacacactccgttactcggctccggcgccgcaccgaggcgtacgcactcagcccgcgcctgcccccgcccctccgcgctcgaggaccagaggccctagcagcagcagcagcaacagcagcagccccagcagcttgcaacagtcgaccaccgaccacgtagcaggtgatgcctctcgccatctcattcacttttgcatttgcgtatggcatggcaactcccgcccccctgtcgctttaacaccacctaaacgcgctaacctgtcctttcactccgtcagaccccctcttcttaacccgtcaccatgtacacgtcgtccgctcccggcccggcccgcggccgcggcggcaacccgaacgccgtgccgcccccgcagcaggcccagcagccgcagctgcgcggtccgacgtcgggcaaccccggcgcgccgcctcagctggccacggcggccacgagccgtgtgggcgagatgctggaccaggtcaaggccgagtacgaggccgccatccagcagctcaacatggccaagatggagcagctcgagatggagcgcaagatccagtcgcaggtcgtggagatggaccagatccagcagtcgctcaaggcgctcgaggccaaccaccgccgcatccgccagcagtacgaggaggacatgatgcgcatgcgccgccagctcgagacgggccaggtgccgccgccgcaacagcagcagcaggtgccgccgccgccgcagcagcaacaaccggccgtgccggccaagctcccggccaagcgctcgcgcgcaccgcccaccagcggcggcatgcaggacgactcgtcctcgctcatgtccaaccttgtggcggccgccacgtcctcgggccgcgcgcccaccacccagcagcagcagcagcgtagcggcagctcccccgtgcgcgtcgtgcccgtgcagccggcctcgcgcagtctgcagcagctcggccagcagccccctcagctgccgcctccgccccagggaggcgccgccaacccgcctccgcagctcagcccgctggacacgagcaactccaacacgacgccctcgtcccgccgcatgcccagcattaacagcgaagtgaacggcaaggaccgcgcggccagctccccgccggcgctcaagaagtccaagctcaacggatcggagcccagcatccccagcctcaacgccaatggcaagggcgcgctgccgcccgtcagctcggccggaggcagcgcccccgcgtccagcggtatgcttccccaggtcaacaagatgaaccgcgagcagggatccaacagcaccaactccagccccagcgccgccagcgcgaaccagtcccagagcgcgccttctagcgtgaagaacgagggcgagaacgccgagagccggccgtccgccagcgcgcccacgacgctgtcggcggcttcgggcaacaacacgacgcagaagagctcgaacacgaaggccagccgcctcaactggagctgcgtgtactcgtccaagaccagcatgtcgtaccaggagtcggagcgccccgcggctgagatgcaccagtcgatggaccaccaaagcgtcgtgtgctgcgtgcgcttctcgtcggacggtacgatgatggcctctggctgccacaagaccgcgcaggtgtttgatgtcaagaccggcgaccgcaagttcctggtgtcgcgtcctgccggctccaacggacagacccccacgtctcaggccaacgctgccgctaacgaggccgacgacgcctacgtgcgcgctgtttgcttctcgcctgactgtacaaagctcgtggcgggtatgccgcagaacactatccgtgtgtgggacattgcttcgaacgaggagggccctgccatgaccggccacgagtcagagatttactcgctggactacgtgaacgacctgattgtgtctggctcgggtgaccgcaaggttcgtctttgggacgctcgcaacggccagtgcaagaagatcttcggcaacgagagcggcggcccgtcggacggcgtgacttcagtggcgctgtccccggatggacgtcttctggctgcagcctcgctggacaaggttgtacgaatttgggataccgagaccgcacagctgctggaccgcctggagggccacagcgactccgtgtactcgatcgccttctcgcccgacggcaagaacgtgatttctggctcgctcgaccgcaacatcatgttgtgggacgtgtgcgcgcagggccgcaccacgacgcggccgcgcatgcttttccagggccacaaggactttgtgctgtctgttgcatacacgcctgatggaaggtgcgtctgctgcgaaatgctcttgctttatatgctactgggcattacacttactgactctgtctgctgttgtgatcattacattacaggtggttgatgtcgggatcaaaggaccggtctgtggtgttctgggacccgcgctcgtcgcgctcggtgctgacgctgacgggctaccggaattcggtgataagtgttgcgtcgtccccagcgtcgccctacttcgcaacgggaagcggcgactgcttcgccgtgatctggaagtaccagtgccagactttttaaactatacagggacgacgcgacgcgatgaggcgcccaccgcagctagcagctcagctcggccgaacgaagcgcagtgggagcaatgtagttgcaacgcttgcggcaggcgtgcgggtgttggctgggcggcttggcgagcggtgggtgatgtattagcgagcgcgagaccagcagcagaagacgagcaggcatcggaacgaatcgaagacagaaaaagacagcttttgtgcgatggccggaggacagacagacattaggcagacagagcaaggagacgcagcgcccggttgtgcgacgagcgccttcgacggtccgagcggcgctgccgtgatgagcattggcggtgcgtttacctgaagtgatttgaggtggatagtgcgtgtgcaatggaatggatttcgaacgaccgcggaggtgttgcgttgcgtcggtaatagcccccatacctaaaggagtctgcatagatacattttgtcactacactgcgtccaagtgcatgagtcccattccacgccacactgtcttgagaccgcacacattcctcatcgataggtctctttcaaccggacacaccctccctatgtacgacgccacggcggtccccacatcaaaatccgctacgtcagtgacagactgaaagtatcacttgaagatgctgcgcttcatggcgtctagcggccgattgcagccgctgcggaaggctgcatcagatgcgcctcgtcgcggcgtgtctccctccttgagtgcgcgttacgcgggtccacgccggcgacactacagcgcccaccacgttccgccccacactccgccgcaggttcctcctaacctgagcgagccggagatggtgcggcgcctcatgcgcagccagcgcgtgtggtggtgggtcggctcgctggtgctgggcggcgtggggctcgtggccttcgggccggagctcaagctcggcatgagccgacacacggccgaggtggcgtcgcgctcgctgcaggacgagacgctgcgggacaacacgcgcgagctggcgtcgcagatcgtgcagacggtgctgaacgaccccaaggtgctggaccaagcctccaggttcctgcaaagggtgaggaagcgcttcaagggcgaaatagtgttgtgttgatatgattgcagctttcattgtgatgagtttgggtgaaatggtgcaatcatttatgtacgagtagttgctgacaaactggtgtttcgcttgcttgctgcagcttgtggtgatggattcgacgcgtgaggcgctgcgcgctttggtgattcacacgctgaacgacccgatgacgcggacgcaggtggcggatctgacgaagcacacggtgacggcgctgctggaagaccccaagacgctgcggcagctcgtggacctgttgcggtcgacggtggtggaccccaaggccaaggaggccttgttgctgctgctggagcagatcatgcgtgacgaccagacgagggccaacttgacgcagctgctggcgcacacgttcctgcaggacgcggtcaagcagaacgtgggcaaaacgctcagcgactcggtgcacgacgtgctgagtcgcagagacgtccagaaccacgccaaggagttcgtgagcggcgtcgtgcgggaccaaacggtgcaggcgcagggaggagaggcgatctggagcaccgtcatgtacgctctgacgcccggctggctctcgtggatctgggagaacccaggagatctggccaagggggcgactacgcctgctgcagaggctgccaaggttatggtcgctgctactgttgctgaggagaagctggagaaggagaagcagatgaggaagggggagactgacaagcagaaagacgagcagtctgcttcaacggagaagaaagacgcgtcgaaaagcgcagcagctactatcaacaaattccccatgagaagaatgaggacaaagcgtatgtcaggacctcaagaggaagtctcgaaggatgagaagagcaaggaatcagcgaccaagagtgcgtcatcacacgcggacttcgctgagcggtacgaagacaagcactggagcggatctggcagcggcttcgtttagatcaagcgccaactgatgaagattctccaacaactcaacaattcaaacctcagcaagaaactggggactttaccaaccaacgtacgcaacattgcccgctgtatttcactgatattgagcagttgttgtgtttgtacctgtgaactagaaccggccgtagacaagcgaatcgagacgatgcacctggtttaacaactcgctgttctggcgtttgaggcgcatcttttcgccggccaagagctggttctcctcgcgcgcgatgccaagttgttcttgcagttgtgctgctgcagcctcggcactctgcgctgcacgtctccacgagtcaacttcgcgccgtgcgtgacggtattcctgctcgatgtgtttccgctcagctgcagctacgcgcgcgccatcgcgtagtgtttggatctcctggaccagctcccgctcacgtgttttggcctgagcattctcaagttcaagagcacgcagagccgcctcgacgcgctgcagaatgtgcagctcagcttgagaggacccgccgtctccgtcgtatgccgtcgaagttgcaccttcactgaaccatgcgggtgattgccgtgtacgagctgcaactcggtaggggggtgagcctcttgatgacaatgaggatgcaagtttactaccactaaccgctcgcgtcgtggttgtgtgccgttcgtccaatacttcagaagtccgccgaaagctccgtctccggtactgggttggttccagatcatcgtcactcccctgatcgttgttctcaaagtctccaacgccgtgtggcgatggtctgcctcgacgagagcgccgatgcggtgaatggggcatttcactctcagatgaagacgacgaggaccgagggctggagacatggactgcgctccctcgtcgccactgcgttgtgggtggatctgttgtcgagacggaagaaatggacgatatgagcgactgtcgagtatccgaccgaggcaccggctcaagcgcaggagctggtggacagcttgaagaagagtcgacagtgtgatccagctcgctgttgttcaccgctggctgggcaggctcgcagcgttcgcgaacgcgacaggaagccgcggttgcaactgctgctaatctgtccggcaacgtgtaggagatggcggaggacgacaatgacgaagactcgagacgctgccccggacggatttctggagggcctagatctgaccgagacatctcacatgagacgtgccttctagcaggcgaaggctctctggttgtagtcgacactactgagggcgctactgctccagcgttagcgttggtcgtgctggaggctctgctgttcctgctgccattaagctcactgtggcttgtgagtggcgacggcagcggtgcaacgggcgacgctcctgacctcgtcgaggcgctggaagtgggtctacgttgctgatgcgcttgctgctggacacgccgcacctgcgtgatccattgctggcagtgagtggcggacggcgccatgagctcctctttcagcacttggccgctcatggtggcgacgggcgcgtagtactcgaggtcgcagcgcgccttgttcttcttgggcacgacgttgagcagttgcgtggccaagtcgatggtgaccgtctccgtctcgttctcgagctcgctgtgcgcgtcttcatcttgtggtggcgtctgcaactgcagtaacaacttgccatcgcgagccaggatcgagcagctgcatggccgccactcgaagagcttcgtctcggcactcagcaccttccgcttgagcctcacgccgaagctctcggccgtcgtcatagcccctcgacaaaaacaacgagactgggaagtggagcagctggcagacagcacgtcgcggaagtctcagctcgtaaaaataccagagttgtcatgcaaaaccaacggctattcagagactcgggatgtttcaggggtgtgaccggtttaccccgacaagtcttacacttccgcgaatggatcaagcgacattatgatctggctattgtgtctcctgtgcaactccggccatggcttgattaccgagtcgactttcaagacgtcattgtgctgactccggaggtcccgatgaatgtgttagcagccacgctaggctctttatactcgtaacgaagcccaagacgtacagcagcgacccccagatctgggctctacttttcacgtgtcgtggggacgacgtcattggcgaatcccatcgaacggaagccattccgccagtagttccagcgaaccgacgacgatcaatcgttgatagccttacactacagtatcttcgaaatcccatgacaccatgttccgtgctcggctcagtccccaaccttccgccttctggcggacacggtcggatcggcagcacctaaccagaagatggacgtcccagacgcaccgacgagagtgaagctgcggtgccgcctattgggacatggagtggtgttttcggttgagattggtcgtcgcgaagtggcagggtctttggtggctcaaattttcaacactccggaagtaaattggcgggaagtgcgcgtttactaggcgatggatgagaacggcaactggctgctcgacacggtgaacgtggcagccttacacggagcggttcctgacgtgtatcaggagctcacggatggcttacttatcagcagcgtcaaggagctcatcggacgcttcggtgttgctgctgataacaccactcaactactcgtgtgcctgaggcaggagccgtcgacagcaaacgctacacttccgccagcagcccagcagcgccgcggtggcgacggagatgttgggttttcttcgctgtggaattatcctccattcccaactgaccagccaaatcttcctgaaccggacgagctggggggatttcttcaacgacatttgcctgtatcggttcaagtggggagaactcccaccaatctgttcgctgaggggactcaggagatcgtgtgtggagatctcttggcgcggattgacaccttcttggagagttgcgtgcctggactcccggagaccagctcggaggagaggtggcacctgttctacgatcaattgattgaactgagcgtgcacatttgccgcgcaaagggcatggacatcaacttcgtgaggaacgcagctgacccaaccggaaccacgttcggcaccttaagaccctgatttgtagagggattccgttgctacgagttgaggagaaacgtgctcgtaagaatatgtcgaaacctctggcggaactgaccgacaaaatggttccctggcagtcgacgtactatggcaaccttccctacatactggggtatgcgtcgagtgaagcccagatccagtttgtcgccatcaataccaacctcaaaaggatcccgttggtgacgttctccgttttccacaatggtggaacggacgccaccaaagcgttttataacttggcgttcctctttgattggatgatgaccgtgtcgaagcaagcacttcctgcaacatggttctcaagacacccaagtgccactggggaggagcgtggccgaacacttcaagtggttcaggatgccatgaagcgtgaaaccaagcggagctgggtggaaaaagaaaactactcgcgactcaaaggcatttacaggacattggctggaataactccggtgcctggtggacatacgcatttacaggaagtgaggcgcctggatattcaaagatggcggcgtaagttgatcgtccgtctgggtccgttgggctatcatcgccttcctgagaccgagaccgaattgagcgagtggttacgcggcatgctggttgctttgaacaactggcatagtcgtggttattgtcacggtgacctgcgctggggaaatgttgtctacgtccctgctactggattctcattgatatggacaaggcgcacgagcccggggcaccgattacataggagcacccgtgtaatggtcggaagctgaagtatgatcacgacctttaccagttgggaaagctgcttgatgtagctgtttcgcgagttgcgttgactggaggaccggaaggaggtcgaatccggcagatacaagagttgctaaattacttatcagctctcttggacgaccatgatgacactgatgaccgcgcagactcccccggtgcggattggtaccttgagttgttggtgcctgacagcgatgcttcttaaggatgccgaggacaacgagggtgaacctcacggctctgtgacgcgggattgacttggaatccaagcttcaacctggatgaattccggcgtgtggagggagatacaagggatacggcggctctcccatttattaaatgctgttctaaattcctagttagtcgggctcaacacagaaaaaaagtaaatcgggaagatcttaaagtaaatggcaaaccacaggtggcgttcgacatcctgtccaataaagcgctagtagagtgacagagatcgcgaaggccgacttgcctgaccgctcgactctgccgccttcacctgggcgggtggcaccatttccttcatcatcaccagcatcgattcgggcgtcatttcgggagtgtgaagcgccggtagaagaagcacgttcgcaacgctctgcaggtcatccgattgacacttcttcgtccgattcagcttcgcgagcactttcttggccgtcaccgcttcagtcctgtcgcgagctgaaagcagcttctgctgaatccacagcagtcggtgcgtcaaggggaattcaagcgtcttcatcagtgtgcccaagtggaacaagtctgactgacaagtgaacttgctggcggaatcctgctcctgcatcaaaatactcgaccggcgtggcgactccaacttgacgagcatccagtaaccagggtgccgatataccacgtctagatctagaatgaactcctgactggggacatacaccatgttctcccaccgaatgtcgccatggcagtagccgctctcgtgccaggttcgtagcgcatgaagcatgtttatcagccacctgttgacttcgtccacatttccagggaggcggtagaatccctcccgagacagctgcaccacagttttacatgacgggaagcgagtttgcttcagcctccacacactttgaaggctttgtggtgtatatttgatcgcctgcagattttggtaaataccaataatcctattgtagtcgtctctattcgcgcaatgatcacgccgtattgttatccgcgtcgtgctgtcgtctaccagctcgattgtccccgtatcactttggtagggtttgaacggagagccgagaaggacgggtccacttggacttaactgccatgtagctcaggaggaaaaccaagttgtaaaaaagcttgattgccattgtcgtggagacttcacagatggaataaaagtggttgaatcggaatgcaaacagcttccgacggttcccacaggcaacgtagcccaaaatgtacggaagctcaccaaaaaattgcggatcccagcatgtcatcttcgactgcggctcggcaatagtgtcgttcatatccgcaacgccttctctttcttccccacaaagcacaagacatccatcacaaaacacagtgaggtccgaccgcaaacttttcccagtacttccatcgtcagtggggtctttccgctccacctttaattgaactccattcgctctggaaatctgaccggtaaaagcaaacaacagatcgtcgagcttctggcaggattgcttcgtgtcctcttcatccagtccaacctcgaaactcatcaccagaacatcaattagcgatgagagagcgtcgcagctaatctccggaccatcctcggcaaaaatcttagcagccgtgtgccgattgttgatgcagactcggaatggcagggggcgttcaagatacaacgacagtgtagacggaagggatagctgcaacataccaagttgtgaatattcccagaggcctctcagatcaatgttctctccacccactggactagcaatggcttccggtggtaacttgaaggatttgacggacattgttttcttggaagcgatctgcacctgaacgtgacaccctctctgtcgaggagacaaggccgtaccgaagttccccactttctcgtagtcgcgcatttcaactagggcgccggcctctttcagttcagctaggctgcgctcaaaccaatgtatgctctttaccgagtacagagtgatatcactcggatggacgtcaacgtgtgggctgttggcaatgacgctccgcagcttttcgactctggtatcgggctcaatcatcactacgaacggaggtgatcctctcccccaaatgccgcaatatagcttcatcttcatcgtatcctgttaggaaatgactcgacgtttccagactcctccagacatgcgatgtcttgttctatcagcttgttttaagatatttccgagattttgtttttgaatatttccgagattttttcaccagtagcgtgcacctcgatgactacattcaaaagatctgctgcattgatggcgacatgtatagtgaatgagctgttagggccgtctcggtcagtaatggattgaatttatgattttggtaaatggacttttaaactccaagcaaggatgcaccgttcaatgtctacacttctcaggcgctagctcaagcacgataactgtctctttcttcccaccaatatcatgaaaggaagtcgcaggagtttcggggtatggtttccaggttgattgcactcctgagccttcggcgatacagtaaactagattgcacgccccccactctgttagcggtcgggtgtcggattatctgtactaaaacagtcctaaatgtcctaaactgtcctagaaaaccgaattgatactcccataaatgacggtaacggtaatttaaggtagctgtccttacagtcctaattacgacaaactgtaggacgtttagaacagttagaacagttaggacagttaggacccccccagggacttacgttctataaagacacatctattgtggaaaccgcttcatttgcctattttgctcatacatcgattgatttgcaccctgatttagctcaatcgatttacaaatcgatcgcgtcctgcgatgcatatgtgagtggatgtgcagattaggcgatcgttttatggaagttaagtcaataaagccgcgtttggagcagaatgcccaccttttactggacaatcgcgcagtcaagcgatgcatccagatcgcgatcgatttcatccctgaattgtactctgattaactaagtgattgagatctaataaggggttgctacagatgggcattttagccggttctcacaatagagtgtactatactatactatacagtacttgctgttctgccactacagtagttacttgatgttgaggtgggcaggacactctcgcgttggctctcgcctgcggacttagcgacggcaagtcctcggctcggccaggcgcggtgtctaggaaaataaatatcgggttgcagcgctcgcatatgctcgctcgcgcagacacgcccccgcctgatcggcgggtgctggccataggtgaatgcaccaagtgaggctcgcgctcgcattcgctcgccctcgcccgcattcagcgctctggtggacggtgtgtgattcacacattcacacattgttaatcgaggaaaaaaccttactgctagaaccaaggttttaggacatgtcctaaacattatcctaaaaggcgtcctaaaaaccgatggattgcttttggacggtattagggcagacctcccttatactggcacctgccgggatgtgtcggattagctatatttcggcactcttgttttgtttatttcggcacagtgccagtttaaggaaataaagtatgcaatttactacaatttctctaccatatcgaactgtttagcctggaagatgccttcaagggctaaagaagtcaacgaagtgcgccggtcgttcagttcacacttcaatacggaaaaatcggattcgacggacgccgtattcgcggatacggttgccaatccgcagcagaactggcggagatgtgaaaatgtctttggagcagcagcgttttgcactgaatcccaggcgtcgttgaagctggtctcatacgattcttcctccagggctgtgcgaaccatctcatcaagcagattggcttgacacagctctcgatgctcccgttcaacggattcaatttttgcctcactccaaaacaaagccaattgatcgcggcgaggattcaaaatatcttctgcaaactggcgaggagggactgtgacaagctcagctggcattactggcggagccggagatgcggcagcgtcattgttgctgtctcgctcagcttgtacatgctccataccttcaattagatgcagtacaaacttgccaagctgcctcagaatcgaatttttgtcggcatctgcaacactattcatgtgattctggacgaacgtcccctggtctttaataaactcgagcaagtgttgctctttgagccagtacttcgtagaaatcgtgtcattagcgctagattggaattcagagctaggtacgcgttcaactcgtagcagtttgcgaaggcgatctacaaggagctcaatctctgccatttgctgcgagagcaggatatccttcccctgtatcttgacaaacgtgacgttcaccaccaccgttatcccacaaacaacagctgcattgacccaccatgatggcgttggtgccgcagacacgttttcatcaaggtgttcttcgaggcgaaaatggttttttaatatccactgcaatgcgtttcccatgtacagccaccgattagttagttttttggcggcacctcccatttcagtaatcagggttttttggcggcgaaggtgaacaattaaatcctttgtattcttcacaaagtctccattcccaacaatggaaaaaccggctttcatgaccaggtccatctgatgagcagcacaccacactctcagcaccgagtgggtggcctctttctctaaaagagcgaccaccccaccatgacggcctgtcatagtgttctctccatccgatgaaataccaaccaacttctgtctccagttagcgaacaaaatatcgagtactcgaacaatcaggtgaacttggaccacagcagtgtggcggtcaaacatagggaccgcgagcaagtgtaggttgactagcacgccgttgacggcaacacgaacacgctgatccatgaaagagcgatcggtgtgggttgtgatgccgcaagcaaatgcaaccccccacgcgatgaggttgctgatgttgaaacgaataggcaactagaatacgagcataagtgcctgccatagcgtcggtcataccgtaaagcttcgagttccctgtggcgttatagtgctgctgaattactgctgccgtctgccgaaacgacaacccaaccgagagatatttgaccgaaagagtaaaccgcagaggcgtcttaatttccactgtgtagaccccatccactaccgagccgaaagcacgaagagccctcgcaacagtcatatcatcatcttcatcttcagcattgaaaaatacttttccaatcagctcagtcacaattaattctggaaaagaaaaccgcaacacagcactctctgtgtcaaaatgagctaccaattggttgcttcgagaagtgagatcagcaaaaaatacagccttctctgcgtcgctgagacctgtgtattctccccacttagctgagtgcgcggaagtattgtgctcgatgtagttctggggtcggaaaggagccttgtagtacttaatattttgagtacgctttcgtttgcccttgggtgcttcctctctaccaaaatatcggcaaaacaggcagcggaccgagcaagccgctcgaggtcgtagcgtgtgacttgatcgagctccgtcaggttcatgaaccacgaatactcgaatgaaatggcgccggatgaaacatggaagtcgagtcgctccgacttcgcatcagcaggaacaaagggcgaccataccgggaaccaggcccaataccttctgttcgagctccttgacctgagggtggcccctgagacgctcagcgacttcctcatacggtcgaaagttgccgattatcttgtggttgatctcgatccacaactcgaattgtccgagaggagaggccaccaccacgatggtggtcaatcgttcgtggcaggttttcgccgatcgcatccttgatcttctttgggccaatcattccctgccccaatagactccagaacctccgtgagacccctccacgaagtagggtaagataacagctaagcaggaatccacccgttgccatccttggcaaggtagagcttgaggtcgtctgcttgcacgttgtacaagatgttcactaccttctccatgatcttggcaggcaaacaatggaccaactcatccgcgtccagactacgatcatgttgcttttttgaaaatctgtattttttcagaagaatgttttgaggacaaatccaaaaacagtaaaagcattttttttagagattctccagagatgagaacgctgtggtgcggtatcttggggagtgaatcgccctcattcacagtggagattgggaccatcaatgcagtagcagagttgagaaatgccattgcaagcgctccgcaagtgaacgctgactcgaacgaagtcacgctttactgggtgaaagaagacatgcgtgcaaccaagaggagcataagaaatctctacagttacgagtagaaagtggtgccctggttgaaatggacgactgcttcactgtggacttctatcgctaccactgtctacaacctcttctttggttctctgtggacgtttctggggagcctcacgttatggtgctgatccactcccaagaagaagaagaagaagaactggagccaaattcagctcgggaagatgttggtcttgcaggcctgtggaactattccaagttggagttggggctagacagatttccgcttcatgatgctttatcattcctgcttcaacgccgcctagcattccgagtgcgcatccgcgaccagcaaaccgccaagttaatatttgcccgagctggcccagtaatccggttcgacgctctctcatcgctgatcgatgttctctttatgagttgcgaggctggactagatgaagaggatacgaagcaatcgtgtcagaagttcgacgacctgctttttacttttacggctcagatttgcagagcgaatggagttcaattaaaggtggagcggaaagatctcggtgaagatggatcaaatatacggtcggacctcactgtgttctgcaatgggtgtcttgtgctttgtggagaagaaagagaaggcgttgcggatatgaacgacacaatcgccgagctcattccaaagatgaaatgctggaattcacaattttttggcgagcttccgtacattttgggctacgttgcatgcggggaccgtcgggagctgtttgcattccgacgcaaacccatgttttccatctgtgaagttccacgacgatggcaatcaaggttttctacaatttggccttcttcctgagcaatatggcaaccaagtccaagttgacccgtcccactcaactctttgcgttcaaatcctatcaaagagaaacggggtcaatcgagctggtagacggcatcaggatgcagatcactatacggcgtgatcaatgtgcaaatggagaggagtacaagaggattattggtatctatcgaaatctacaggtgatcatacataaaccgcgaagccttcaaagtgcatggagcctaaagcaaacccgcttcccgtcgcgtaaaactgtggtgcagctgtctcgggagggattctaccgcctccctggaaatgtggacgaagtcaacaggtggctgacaaacttgctttatacgctgcaaacctggcacgagagcggctactgccatggcgacattcggtgggagaacatggtgttcgcccctgattatcaacccttcgaaatcaggacactccagcacttcggctactgggtgctcgtcaacttggagtcgtcacgccggtcacgtttgttgatccatgagcaggattctgccagcaagttcacttgtcaattcgacttgttccagttcggcagtttaatggaggagtttaaattccccttgacgcaccgactgctgtggattcaagacaaacttctgtcagctcgggacaagaatgaggaagtgacggccacgaaagtgctcgcgatgctgaatcggacgaagaactgtaaatcggatgacctgcagagcattgcaaacatgcttttgtcggcgcttcacactcctgaaatgactgccgaatcgatgctggtgatgatgaaggagctggtgccacccgcccaggtgagggcttcggagtcaagtggtctgggagattgagttttttttaatttcgggaactttccatgttgctgggctaaaacccgactacaaaataataatctttgtcaactaccatcaaatgaatctcgagagtcatctttcaaaacccactatcactcatggccacgttgaaaacttaggatcccccagccttagaactggcaggaaactaatctcctaatcccccgacttcaatggggcaaagcgaaagtggcaccctcgatcgttgcgtcgaggactaggacacacgacaggaagtagacaaacgtcctccggggggagtcggcgtaggccgttgagcaacgccaccgtcctcgcgtcctccatcccgtcttcatctggtggacggatcacgctctctttctggtcgaacggggcgtatcgaagttgctcttgaaggccgacaattccactgaaaggaagcacgcgactcagatactgagcctcaagttcggcacacgacggtgaggatctcgaagttcctggctgcgtggtcggtcgtttgcgtggcgaggtatgtcgtaggcttctttgaagttgcatgagctcacggtcctccgttgtcaccggtcgtgccagctcgtccaagcgcgaggttgccggaattcctggcatggtttcatctctcacgaggatattcgggaagagaatgctcccgttccgcatggacgttctccgactggagtccccaaacagatgagcggcatcgctgaggtggacggaggcgtgcctggatggagaacctactacgtctctgctgctgtcgccaccgcccgaattgaagcggaaggtgaagtctcggactcgttggtggtgctcccccatgagcgctcgtacgacctcctgtcgaggcgagaggaaggacgcgatcgtgtctttcctcagacacagcaacgagcacgtgtcgagtgcgacgagctcccagggagcaggagacgtcgtggtggccagggccccctcctgtccgaagacggcgggggcctggacaacggccacaagcgactgtcctctgatcggtggcttcgagactttgacgctgccgtgaaccagcagcacgaggacgctgatttcctcccctcgacagataatgtgcctgcccgcgcgtgctgtgagggaccgagcagcgtacgcgaggtgcgtgacgatgtacgggggcagcgcgtgcatccgaggaatcgatgcaatagctgtctcagtcgcgcgcaggacgacctgcttgtacggcttgatggctcggcgatagagatctccaggcaccacagccagctcggctgatgtagtagcgaacgtgacacaggcgctggcagtgcgcagaccttgcggttcgatcagactgatctcaccaaagcacgagcctggagtgagcgtacggaagaacccggtgctataggccgccaaggacacacacccagtgatcagcacgtagaaactatcgcctgcttctccttggcggaagacaaactccccggagctcacgcgcaagtacgtactggtgcgcgcgagctcctggaagatggagtctggcagccgcgcgtcggcgaagtacttgaggcttgccagccacttcttgagatgtcggacgtctgcggacgatcgattcggtggcgaccgctgcagtcgttgctggacgccgtgtgcgcttgcgagagccaagatggacgcgacgtgctccgtgctgctcgtctgcagcacgtaagacgctgggggtctcttatcatcggacgccagcacgacctgctcctgcatgagcgactgccgaggtcgagatctgtagctgtagctcagacgagttcgcggtggcgctgaaggtgccggggtcggttcgtcccagaacgtcacatgttggcgccatacgcggcggtgcgttcgtcttgcctgcatccgatcgagtgtcgtgaggtacgtgatggcatgtacgatgcgctggaacaccacgcgtagagggggcaaccctgcaggcacctcgacgatctggaaatcctccaagcgggacgtggggctcggaaagcggatggttcggatagtggagaagacgtcgccgatgctgcgatagcgtggggagactcgcatgacgaccacgctcttgtcctgcagtccgtagtcgcccaactcgtcgtcgccctcgagttgttcgccgtggaagagcagccgctgctgctcgaatggaattccgaattgacgctggagagctgcctgcatgcacacgagcgactgggagcggtggacggacacgcgctccagctcggggcggccggggaggtggaagaacacgtcgaagcggatatcgcgcatgcgcaggctggacggctggtgccaaagcgttgaaggaccttgggtccgcatggagattttcctcctctgtgctgctccagccatagcgaccacggacacgggttgagcgaggcgtggggtgaatcccccagccccgagacccaactgggacgccgtcattgagcgtctgcgtgcttggttcgccatccctgcagcttggactccaagccgtgcagggttaatagcgaatgaacggcttgttcattgtttgtcgatgctgctcgttttgctgctgccattctggagctgtatttttagtggtgatgatctgaggaagtgacgaaatatcggtattggcgagtgccagtgagttatgtgctcgctcacaaggcgtctctcatgcgaagctgcaggcactttcaattaaataggaaggactggctggagtaggcaacacctcagacgtagcaaatcaacttgttcattagacttggaaaacatccatagactgccccccccccctccccccctccccccgccttcttcatttggcggacacacaaaccctcatattaaaaaagagtcccttgagttgcgtaggacccgaagttagcagtcttagcagaaacgcaactctctcgcaccctgtagggcacaatccaatccgggggtgtattgcaccagcagcttactcgtacacgcacaaattttccttaaaaacggtcctttcgacagagcaatttctgctgcgattccgcaatcgagtaccgggagtgcagcgcaacaaaaatcgccttatccttcctagaaggagtcttgttgagcaaaacgtattcgattgtggcttggtcgctgtgttcgagcaatagaaggaccattgggagatcattcttggtcatcgctttgtacaacgtaatccaggtgtccactattccacaaccagcaagcaataccttgaccgcctcaaaacagccaattgatgccgctttttcgactgcgaacccaacagagtcccggagatcgacgttgtttttcgctccaaggtcaatgtaacggggctacatggaatagtgaccctgtcactattccgggatggctacatcggtcactcccctggatagtgacccaagtggccttagagccaacagatacattttgtgtgacacaaactatagggaacttagcatttgtatgcaggccaaatctgtaccaacctataaatacattcagtcttagatctaccgcttttcaagtcaagtcgtccccttcagaccagggacacgttaacggctgttcacttggagtttgtatactcctgcttcctctgttaagaagtcctgtgtgccccgtcacacttggtagcacttgtagtcaatcctacgcctacgcgggttgattggactacctgaatcctctgtggtctcatcgagtgagccaagatggatcgtacggagtttccccatctgaacgactcgcagtacgagtccgttcgtaagatggcaggcatctttgggacagatgccctgcgtagcttagcggcggcgacgccggctgcgcaggttgagcgtatcaacgcgttcgacacctacgagcgagggctcatcgcccacgttcaagggctgcaggccactgcggccgcgccgaagccggtgcaaccgaagcccctgcggctgaaggttcaccccttcgaagggaaggaaggagaaaaccttcacttctgggttcgagaggttgatctcgcgatggacgcggctctcgtctcggacgagcgacttcgtgtcgcctttgcgctctccaaccttagtggtcgcgctaagagttaggtgtatacgcgcgaagcgacgacgcctggatgcttcgcatcatggtcccagctgtgcgagcagctgcgggccgcgtttcttccggcgaactacgagtaccgccagcgttcgcgcttcctcgcctgcaaacaaggaaggcgcgagctgcatgagtacatccaggagatgcgagtgctcactgcctctttggtggggaaccccctgcctgaacacatcaaggtgaccgtgttcatggacggtctgcgtgtcggtcctgcccgcacgcaactgttccgtgtgcaagaaaacactatggaggaggcgattcagatcgccctccaggaggagtacagccacaagcaggctcgtacccccgccacggtatggcagagcaaccctgcctctggcggtgcgcctaatggtaactccggcaatggagcgatcaacgggccggtttccatggatctgggcatggccgagcagagcgacattcactgctacggctgttgcaagcttgggcacatgaaacgtgcttgccccgctggaagactgaagaagaagttctcttcgaagccctttggctctaggggtcgctggcagaagccgcgccccaggaaccaggggaacgccggacaccagtaggggcggggcgctctactggggaaacactaagtcttcatgaggggcgtgcgggtggcgcacgccatggggccttagcccctgagagtctctgtactctcgaagcggagaagggcagcggtgggctgcttgtggtgcacgcgagtgtaccgggatacgatcatcccttgagaatcttgatcgactctggggcgtccaagaactttgcgcgccgccagactgtcgcacgcaatcgcgacaagtacgccgatgcgctacgaggcagcaaaggcaacgggctggtcttagtaagactggccgacggtacggtggtagaagtacctcgggtccacatggacctcactgtcaagttcgaggacttcgacagcacggagccgttcttggtcctagacatggacaagtacgacttgatccttggcatgccgtggctggagaaacacgtgccttggatcgactggcgcggcaagaccatcggggccagccgtcccccacgctctgacagagttttggtgagtcatgttcccacctctggcagcagctggggcgcccgcgagggccgccagggcgcagcagcgtctaatgagttcttggggtccgtcgagactgacgacgactccgaccgggccggacaaggcctgagagtggaggtgccggacagcacctaccaggtgggtaacgtaggtccacacgcgggtaacgaagtaccgcaggcagcaagggctgctggagaaggcgccgctggcgttagcgcgggtaaccaagctccacgcgaggtcactcagaccgtaactgatgggaaggcgctgcaggcgcttccgatgtgggtaacatagttccacaggaggtcactcagaccataactgatgcgggagtcgctggaagcgctcctggtgtgagtaaccaagttccgcacggcgaggtgggtaacatagttccacccagcaaggcgggtaaccaagttccgctcaaggacaaggcgggtaacgtagttccgaacgagatcgagaagatcggtggtgccgtcaaggcggcgccacgagacgaagacacccgagggtcacgtcgtaagccgggcctagtcgtgtggccgacgacgccagtcgccagcgactccgagcctccagccaaggctccagccgccgaagagtgttatcacatcttcgacggcgtgaccggtcgtcgggtcaagacaggagctgtcgagcttacagctctgcccgaggtttcagagttgctgaaccttgaggagctcgccatggaggacttcttggccgagctaaaggccggggagatcgcagagttggttctcctccgaccggagcccacgtcggcagagttgaactcgtcctcggtcatggaccgggcagtcctggaggagttccagagacagcgcgcgtcgcgcatgggctctgagattcttaagaacccccgggacccggtgtacaccttggtgaaggagttcgaggacgtggtgtccaaggatccaccgtccaatctccctccggacaggggaatcaggcacgagatcgatctcgcgccgggcacgaagtactgtgtcacgaggcaatggccgcttccccgggagcagtgtgaagtcattgatgccttcttgccgccaaggcgaagacaggcatggtgcgggagtcgaagtccccgcactcgacgcctaccttctgtgttcgcaaaccgaacggaaagtgtcgtctggttcatgcttataacaagctgaacagcgcgacagtgcctgcgcagacaccgatcccgcgcaaggacgtgttgctcaacaacatggccggctgcacgctgtatagcgcgctggacctggtggacggatactaccagatcctgatgcgcgagagcgacatcccactcacggttgtgagcatgccgagcggtatgctctgggagtggctggtcatgcctcaggggctttctaacgccccggcaacgttcaatcgcttggtcacacaactgttccgacctgtgcgtgcgttcacacagacgtactttgacgacatcttcgtccacagccgtgccgaggcaggccagacggccatggaggtgcatctccagcaccttcgacgtgtgttcgaagtcatgcgggtgaacaggctgtacgccaacatcgacaagtgtgtgttcgcagctgaggagatcaaggtcctgggctgcttcgtcagcagcgccggggtccgggcggatccggagaaggtgaaaaccatcgcggcttggccgcaacctcggtcgcagaaggacctacgacagtggttgggcctcgccaactacctgtacaagtatagtgcaggctacgccgagctggcacggcccttgtcggatctcctgaagaaggatgtcgactggcgctgggagcgtcgccatcaagatgcttttaacgacatcaaagcgagcttacagcgcgcgccagtcctggcattgccggacgagacgaagcctttcagcgtagtctgtgaagcgtctgactacgcaattggctgtgcgctattgcagaccgacgatgaaggccgcgaacgggtcatctcgttccagtccaggcagctcaatgcagctgaacggaactatccagtccgcgacaaggagctacgctcttgtcaagttccgagtgcacctcctgggctcgacgccctttgtcgtttatacagaccacgcgtccttgcggactgccgtcaacacgccgcatctctcacagcggatggcgcattggctgtcattcttcgcggaatacaacttccgtgtcgagtacaagccgggcaagttgaacgtgcttgccgacgcgctgtcgcgccgacccgactacgagcttgctcatattaatcgggtcacgacagatctgtatgatcgcatcaggctggggtaccgagacgatgccagtctcggacctcttgtgcggttcttggccgctggctcggaagccaaggccgagtggctcacgccccgacaacgtgcaaggctgcaccgctatgagtgggctgacggtttgctccactatagggtcgagcccgaggatcctccccgtattgtcgtgcccaacgacgaggatctcaagtacgacatccggatggaggcgcacgacgctccatccagtggccatctcggccgtgagaagacgtacgcgtctgtctcgcagatgttttggtggcgtcacatgtacaagtgggtcgccacctacgtccgtatgtgcgagacgtgccagcgcgtgaagcctgctggtcacgcctcggcaccattgcagagcctgccggtcccagcggactgctggaagtcgatgcgtctcgactttgtcttcggacttccggccgatgaccgtggcaacactggtgttgttgccttcgtgtgccgtctgagcaagatggtccactttactccagttcgtgacaccgtcactggcgacgaggtcgctcgcctgttcatggactgtttcttccgacaccacggtctgcccgagaccattgtctctgatcgagacccgcggttcaccgctacgttctggcagacgccgtttcgccttctcggcacacgactgtcgatgtcgacggcggaccacccgcagacggatggccagacggagtgcgtcaatcgcgtgctcgaagacacgctccgcagtatctgcgcggagatgccccgctcttgggctgttcgcttgcccatggttgagttcgcactcaacaatgcggtacatgcatcgacgggctttacgcccttttacctgaacgggttgcgccaccctcaggtgccgctcacattacgaggcagtaccggggcttcggtcctaagtgggggagaggctcggaaaaccttttcctcccaagtctcggacgtgagtccagccaccttgcggaagcaactgtcctcgtttgccgaagacaggctgaacataatcagcagggtgcgagacaccatggcgcaagcccaagataaacagaaggagtactctgaccgaaatggaagaggaaacatgaacgtgtttaaggttggggatttagttctcctagatactagaaacctaccgctaaacactgttagctcggtcgagagcaacaagctgaagcaccgcttcattggacccttcacggtcctcagccggcatggcgcggcgtacaccatagacttgcccaagtcgatgacgactcacccgacgttttacgtgggtcgtcttaagaggtgccatgaccctctggctctggctgccccgcaggaagcggtgggtggcccggtggagaagagcgcagctcctcgaagcgcggcgtcgggtcgcggtaaggcgcctgatacgcgcgctggtcgtaagacggcgcggcgtacatcggagcagcatacgcagggccccgtacgagccctggccaaactgggcctgatacgagtggggctgctgctgctccggatacggcgcgtggtcatgaagctcggccagaaggccagcgagatggtttcgcagcgagtcgtaagacggcaggtcggctcgacgatccacacggccatggagactgcgagtttcttgatagagcgaggcaacatcctcacggagccgctccacggcaccaggctgaccaacacgagcggcagcctcgccactaaggccgacaccaagcgcgatgtcgaggacgtacacacggtcccggagaagacgaatctcctcttgctgcagggccaccacctgactcggggccccagcatacggctgcgtcgcctcaggctcgtagccatggccgtgcgagaccaccgccggccccccttgatcgtaatgggcagatccactaccacgtggaacgagtcgtccgtgagcggcggctccatggcaagcgccagctgctcgtgaagcggaggggttaccctgagtcggataactcgtgggagcccgttgagcagctccaggcagactgcccgaaggcggttgcgatatgggacgagaagcagcggcagcttcgtaagtagtccttggcttcttggccggtacccggggcacggtagcagacgtagtcgcaccacgcccacgctcttcacgagctttggctctcgcctcttgcttcagctcgtccatcttcgagtggagcttgcgcttgctcacggggttgagcgaactcgatgcggagctcgcgcacgtccaggattgcggacagagtgcgatcctcacggactttgaactcttggtcggaataccctttgcgctggacgtagcgccagaagcggtcttccacctcgttccaggtcatgttctcattcggcttgacccagtggtaaccccagtccacccttgtcctccggcttcttgcgaatcgtggtgatctccttcagtgtgagcttgtgtggtgcaagtagcacataccgggcggcttctatgtcgccaagaaagagaggctccttctcaacgagagcacgctcataggaacccctcgaggtgtacccgccgataaggccacgaggagccgagagcttctccaacagcgctgacgcaccagtgccaggctcgggcgggaagtagccctgcgggtacgtggcatcccgcctgaagaagactcgatggcagtcgtggcagtcggctgcctggcatacacacccgagccagcagcgtggtattgctgctgctgctcgtcgaggttgttggagagctccttgggctcgtggacggcaccctccttgtcctcagactccgagtcgatgaacagcttggagctggagccgcgaggcgacctggaagctgaacgcttcttcgccttggcctcggcggccttcgcagcggcagccgctttcgacgcttgggcacgctcacgaccttgtgccagcgtcagatgcttggatgccagcacctccttgggcttggagcccgtgtcgctcggcgacttctcggccacgaccccagcgtcagccatggcgacttcgtcgtgcgactgcttgctgtcgcctgagccggactcggcgtcctccgcctcctactctgacgaggcctttgcgtcggcgtcaggagacttgctccgagccccgacctgacggccactctccggcgtgctgctacgagagcgcaccacctcctcggccgccttcgtggcctccatcagcgcggacgactcgtccttggccttggccgccctggtcttcggccctacggcccgcggtttcggaggttctttcgcactgcgcgcactgcactttggaggcatgcttccggtcgacgtggagaccctgcggcttgctcggcgatgcgccagttgctctgtgaggcccgggagccgaggcgccagagctcgcgccgttgtcgatggatttcgactttgcgagtgaaatgtgagtcgccggcgtaacctcgctctgattggtcgataagatcgaatctaagtgggggaggatgtaacggggttacatggaatagtgaccctgtcactattccgggatggctacatcggtcactcccctggatagtgacccaagtggccttagagccaacagatacattttgtatgacacaaactatagggaacttagcatttgtatgcaggccaaatctgtaccaacctataaatacattcagtcttagatctaccgcttttcaagtcaagtcgtccccttcagaccagggacacgtgaacggctgttcacttggagtttgtatactcctgcttcctctgttaagaagtgctgtgtgccccgtcacagtcaagcagtagcttcaacatcttgaatcgtttggtcgaagtcgcactctctaaggccctgccaatgtgggggactctccaaccggtgcccaccatgaccttcacaacttgagcgaatcccttctctgcggctgaaagaaaactcattttgacattaaaccgtacccaccagtcgtcacggtttaccactgaagcatatccagtcgttttcttgtgagagcagagctcactgctctcgtaatgtccgacgtattaaactggattcgatccaaaagaaattgcacaagtccattgtgacagccctctgccaatgcataccaagtgtactggtcgtgcgcccgcatctttgccacttccagacgaccaatttccacagctcgtgcgagaacgagagcgaaatccccgcctatgggatgctaccttttctcaagatacaaccgcaaaacatttgtgtggccattctcagccgccgtgaggaatgggccgacgtcgtttaagatccttcgtctgagctcgaagcggtatgacgttgaaagtaaggcatccaccatagcaacgttcccattcgcagcagccttgtccagagcacgcacaatatcccgaacgcagttgagcgctgagaaattcaccacttccgtatggccgccctgtgcagcggctacgagctcctcttcacggttgcacttctgtacgtaagctacatgaagccacttcaacacgaccaagtggccattggccgcagcgccaatgctcgttttacgggaacacccttccgttcgcgtggagtgcagccatgtgacgatattgagtttccccctaacagcagctccatccatcgcgcctaccgtaaacggtcgagatgttccatggacacgaaaaacacgaccaagttcattgtacacggcgccatcgatggttcttggcttcagcagctccctaatatcttcagcaacgtggggaagcgcctgaagagctgacggaagagtacagtatgatggaaaaagattctgcaaaaacaagaagcaaaaacaaaacaccgtcctcctcatccgacgagctgtccgacggcagctcggtaaccgcaagcgtgtcgtcgtccgagtcatcggggatgtcgtccggtagatcaacgggtacgggcagctgaatacgttcgcgtgtagtacggcgcgcgcgcccgcgtggaacgtcagccagacgctgaatgtattcagctgaaagtgtcttgatgacatcgccatactagggcgaggcttcggaaaacggtcgttgagctcacggttaaacctctctagagggttgttcgtgcgcgctaccagctcgttgttcaggccggccacgttccacacgctcacgtcgtactgctccagccacgtccgttgaaaataaccccaaaatcctcgccatttagctttagagtacgcaattccagcgacgtcgcagcgctgtcggatctcgcgcttaacccacttgatgcatcgctcaatcaagctgtggtcaaccaccgttagaatgtcgaggaccccacgggtcatcgcaatgccgcattcttcatccggtatcaggaaccgcttcatcgcacgcctgagcgcctgcttcaggtgaaacagacacccaataacgattgcgttggggaactgagtctgcacggcatcaattaaggcgctctcgaagtcgcacacgacttccgccggctcaagctgttggtcagtgctttgcacgacgaaatgcaccatgtcccagaaagaatcgccactgcgagaagtgctcaatacatagtagactggcacatatagtccggacgctcggtcgtgcaccataaagatgacacactgcttgtacccagggggtacacagcgaaatgtaccatcgacaaaaatggtagtcccgttgtagcgaagtaggttgatgagggaggagtgtgcccagccaatgagtcgggtaggcttgctgaggttctcgcggttcaccgtgacgtaatgaaactggaagaaggagacagcttcgttcagcgccgttgaaagtggcggaatttcaatggccccgtgcacgtctccgctaaagtgctggctccttgcttggttcacacggcgaagcacttgaggctcagatagcccgcggacgacatgctcgttgtcagctccgtaaaactcgctccgcacagcgtcccatatgcgacgtgcaggaagcgcgactggttcgatggccagggtatcgactctgtccttcatagcactggagacgtcgacgaggctcgtgccagcagcatcgacattgcggcaagtgtgggggtgggcggtgtaccccatggtgccaatgaagaacgccatcgtcccgggacagccctggcgccaatggctgcagcggtaggagattttcctggaggatgcccaagcacgtgtatacttatagccgcggaagtagcacgtgctgacctcttgccgcactgaaccccttgtacggccgggtatggcgctgcccagagggccgacgttgcctggaggtcctgtagtgcccgggagagactgcgctggcgtctgcatgttatcaaatgaaccctcgccgatacaagcgcttcgccggccaaggctccacgtggcctacgtgctaccgtgcattttcagatctcaaagccgatccgcgcaaaaatgtcatatgttccaaaagcagatctgtaccgtatatgaccccttctggaggttaccagcctttgagctggggcagtttggattgttgctgggctgcgacctcagcttgaaggatgaatgctcacttcgcctgcttgaaagacttgaagccgttcgagctcctagttgactccagtggcgtattgaggcgagatgggagtccttggctggcagttgggacgttcccgcctccagagtccgacatggtgctgcacctggccttgacctccggcaactcatctcgtcccctgaagctgccgttgtatcggatgatggagtggccggcgatgaagaatctgctgatgttcgacagcgatcgaccacgttcggggcaattcatgaggttgagccactcgtggcagcttccatcgtgctggcaagcagaagcgggggcacctacggggttgcgttgtcgtttttaggggcgttgttatatgaattgggagttttgtcgaagatcgacgccgcgcggtctttgttggccgtcgagaatgcattatcgagccaactattgattccgttcctctctcctccgaacacggcgtggcctgactggttcctgagtgactggaacaatacgtcggcaaagttcacgaatttatttattcaagctgaggcgcagtcgtggcgacttgactttcgtgagtcatccggcgccatttcattcgagtgttcgaggttcatgaacctgtcggagcttgatcaagttacggatcgaatcccctccgagtcttcgattcatttggtggagcatgggaagagttgatatcggctgctgacgctgacagagtgatggcatgcaaccagatttactgtatcattaaagtcaaaggctcaggtgtgcagccaacatggacgtcataccccgcaatgacaacgacgtccgattctgatgccggagggaagaagaagacagttctcgtgcttgagctagcacctggagagtgaacggtgcatcattgcttgagtttgatacttttgtgactttgggaagtgttttgaacgcaacaaattgattgataaaaagaattggttagtaacgatcagaaattgggtcaccacgctgtagtcactgtcttttaaacaaagcaaccagtttttttctctctctcagtcaccaatttgacaccgtgaacacaacacgaatgcatgagcacgagttttcgagactcaaggacgtacagtttccggacgaagtagctgctctgggccatgttctggagctcattgacgagatgctgatgacacgcgaagaggctgtggttaaagctgcaggatcaaatcaactggcatggctgcaattcctcctagagacccacgatgacgatctcatggatgctgttgccagtgccgcagcaaacgggttcatggaggctgtgattcgcatcattcaagagaaaaactagcaagaaagtgacagtgacagcgacagcgatagtgacaatgacagtaacgacaatgacaacggtaacggcaatggtaacaataagttgcagtcggtgagtctcgacgtgcgtccattattaaggaacgcaattgtggcagcagcacggagtgggcagctccctatcgtcactgatttcttgccgcgacttgcggggtccggtcgcattagtgacgacatacaagagatgcacgacgcaagttggcaagctctgaatgagggcgcggcgcatggccaccttaatgtggtggtatacgtggtggagtttgtgactcaatggggttacattgaggactacacttctagtgatgagggtgacgctctactgctggcggttcgcggcggacatggtcacgtggtgcagttcctgctgcaagggtgcttaatcgcgtggaatactcaagacgcactggcagaagctcttctctttgagcaaaatgaggtggccgagtggatatgcgatctgcaggacgctggggaggaggcctcggaacttggcactgaataaccagtcggagtccatgcagccacgttgcatattgatttatgtgttgttttcgtagcaagtctaggttcgagagaataaagctgcattgctgcttcccgtattcctgaacatcggctagatctcacgaatataaccaagaattgaacgagcaaagcaaagcacgtagtaagcgagctcactcgattggtatttctaattccacatgcatcgacgcatatcctgtcttaagcctggtcgcgacgaatgtagaacagaacatacgctcgagaggacacggcatcctccgctgacgcctcgctcgtatggctgtcgttgaagttgaaccagcactcgttcaccgggttcttcgccacggcagtgtagtgtccgccgccaagaccccccatgtgctcggaaacagcgaacagatcataaatgggctcggaaccgttttgcggcccgatcacaaactccgagaggtccagaccttcgacagggaactctaccagcgtcgaaatcttgtcacggtgcatgtaaaacgagttctgagcgtaccggaagcgcttcaggtggaaaatcagcaccttggggagcgaaaacaggtcgaacttcttgaacgcgcggacgtggtctttgcacttggggcaataccacgtgtctgcttcgccaagctgttcccgttccgtgaacttggttaagcagtttagcagcgtgatcggctcagccttggacgagattttcaggttcttcatcgagtcgtggaggtcgatccgttttgctgatttttcatcgtaacctcgttggtagctggcaaaaagtaagcacaacaacaataagttagtatctttacctaggatacaactgaatgccacccatttcaagacgtacccattgcgattccactccagcgtaaagctaaatggcttgttcgagctgtcaggaacgtccacgggctcgtcgtccctcgggagatcactgatgaaagtggtgcctccgttgggttctgtgacgtgcaggcggtacggcaactgctggtcctggccgcatccaaactctgttctggagtccttatcagcgtccttcgtggccacaagacggtgcacaaactgccacactttcttgtgtatccgagcttttgaccatttccggtcgatcgacacaagaagcggcgtattgaataactccacttcgacccgtcgctgcttcggaccatatccctcctccacgagcatatcgtagccttcggaattgttacgtccatccactggtgacgcaacgggagcttggtggagcaactcgacgaggtgcatctgctttgcaggctctgactcagtctccagcgtacctaaccttctacccgccgtgggagggcggatggtaggcgacgaaaacgagtagtcagtcagcggcagctcgagctcatacgcgtggaggacgccgtcacgaagccggtcaacgtgcatacgatccgagtacgccttaagaatccggtggttccatacttcgacgaagaaaatccacgccaccgggacgcttgacagttgactgagcttctccttcgcgtcttgcagggtgcacatgtcctccttggggaggtgcagagcgtacttcatcggaatatcaccattagcccagaacagctgcacttggacggtcaccgtttccttgttcgggatcggcaccgacaggttcatgtacgggtcgaacgtgatcgattcgttgccgcagtccgggttcgagcacgtcacgtggctgcggagttgccccatgaagttgtcaacaatgatactgttgttgcgacgaacaaactgctgccactcttcctgtgccacctccgggtcttcgcgaccattcctctcaacaggcttggtgtatggcttcgtcttcacacggttgaggtcttcatgaaggccatccagcaagaaattcatcagttcctggctatcctgttgctggtaccccgcgaactggggcgcgtactggccgatcacggacttcaggctcgttggggcgaccactgtgaactctccgctccagatcttgcgcagcagcgacgcgaactcgactgccatgattcccttcatacccagagggttatgtcggttaatctccttggtgaagaatgggctgccagtctctgggtccttctcgaggaaatagtcccgaagcggtgctgtgtttatcagacactgcagcatgctgttcataaagcacgtgttgcccaggtttctcagccccacgacgccctcaaaggtaggccggcccttacccgcttcactcccgtagtcgcgcgcaaattggttgtatgaagaggccggcgagaacgaagacactggcgacgtaacagtcgtgctcacgttcagagccttgtgcgtgcccacaggacacaacaactcgttttgggcgtccacccacctctttgatccgtccacatcgagctcaattcggagcgagtcgtgcatctccgacttcttgagatccgtaacacgtccaattcgccattcaggataattctttcgatccacttccttccccacgagcacctcgtctccaaccttaaaggcgcgccaatttgggaccttcgtgtgcagcggcgcgatgcgcgccgacgtgcgggtcagccactcgtcccacttggctgtccatccacggtaatgcactttcacctgcgtgtcgctcaaatcgatcacgcgcgcttcgtaccacttcttgtccgtgtccaaagcgtcgatcaactggttcttctccagcgtgaaccgccacgcctccgcctggacttcactgtagaacttgccgtgtctccagtccagcatctctctgccaggttccgctgcaaagcgtccttccaccagcaaatggtgcagcttctccctgccaggcttgtagtccctctgctccagctgcagctcccccacggaggtgctttccaccagaatatcgggtctgcgggggcttgagaacccgttggcgcgtgactcggccaccacggcgtctctcagtggggtccagggcgagtcctcgtccattctgtagcatacctgtacagccttgccgatgtcctcctcgctcacatcactgaacatgttcctgagcgcaggcgtgacggccgccgccctccagatcttcatcttgagctccgggagcgagcacttctcgctggccgtgagcaccagcggcttctgttcatcatccagcagctccacgggcgcctcgaggcccgtgcgccagcccagcacctcgaaggccacggggttcacctccacgacgcgggccgcagcgaattcattgcatttccagtcggcaacacctctttaccgttgtgcgccgatgcatttgagccgcagcttccctttcgtggtattggtggacctttggatcaattgaagttcgcctcgttcgaccagcaacagcagaaagagagcgtgagttgtccaccggatgaagcggtgtagagggcgcgaagtcagcggttttgctatgccgattccgtttgccgcccattcctctgtgctcttgtgtagccagcaaacgacgaaagttgtcgggcagatcgaaaaaatgacgcttgattaaagatgccacggagtgcgtaaatgaaataaaatagttcatcactgtcgcagggcgcaggactcgagatagttcacgacgcctggtaaagcgatgtcgtttctggtagaatccgtggtcaacggaagttgatattttttcagttcaatgaagagaactagtgttcgtttttttccaactgatggggccgacagtgactccaaacctgcgaccttggacatgcccgactgtgaaattcggtagaaatcgacatttttccagtcgtttcccatatccgatgcactttcgcgagtgaagtaggacccttgcaacttgtttgtcaccattaggtgcactcgagactcagcaggaatccttatcaatatcgctttcaagacagcaagattcaaactagagctgtaatctttgcattcaccagagatttcgttggacgaaacacggaagtcaatgcggtcttcgttgcgcgtacgtatcaaatttgtaaacttacggttgtgtcatccaaaccttcggtaaaccatcgtggccaacacatgtttggagtcgacaaaaagggtacaactagctcatcgagctcggaacttacaaaatccaaaggtagctcgaaagttgagtcgaagcccaactcgtaaacaagcgcccccataaactgtgtgaatggtattccacgaaagccgcctcgatgctagcgacagcaattccagctgatgcaagagcttcaagacgcataccaggattggatctctggagaatgttgttgtagttcaccagattatggatatgtgggtccgcgaccagttgatgcagtggctgctcgaacggataaaatcgtcttcctccagttagggtcatgtgaagcaacatgtcgttctctgggacaggaaatgtgcaggaacactgccacgctctaccattcgacaatacgcccgatacgcccgcttctccaagtgacagctcgaagaacttgctttcgaccaggttcatccaagtaagaaacaatgtttgcgtttttgaagttgtgagttctgacgtactccagcgccaaatgcgtaaaaagtggtctgctaaatctgttgtagtatttcaggaagatagagcgcatcaatctcgtcttcaacagaagcaggacggagtctcggaaaaatgaagcaccacaaaactccatcggtctgaacggcatctctggaacgactcccaagctgtaacaaatttcttgcggagccgtttgtagagctgatcgcgactgggataccgaaagatcggaatgtgttcctcattattcgcacccgtgtcaccgattcctcacgcttcttgtcagtaagtgccgatccaattggagaacctactcgcggaaactcgtccaagaagaaaacacagggtttacctcgttgctccagagcctcaaccacatcggcacgaataacagcaaagttacccacatttcctttaccccgcaacgcagcgacaataaatccataagtccgtcgagatgatgttctggacggacccatccgctaatagcgcgatgtcattttggacgcacgacaaaaaacactccgctcggctcctgtacgcttgatacattgtgtgggacagactgtgccctccatccggcggatcgagggcaccatcaatggcatccgcgtaaggaatgtagtagacctcgtggactccatgggcttccaggttgaaagccatctgggttttacccgttcccgatgagttttccaaaactatgaagggagtggggtgcttaccggtatgacgacgaaccgactcaatcgtcctatccagttggacgacatatggatggtccttcagccgcgcagcaatccgattgacgccatcgtcgtaatcttggtcttgctcaatccggcctttggttggaacatacacgcgcgagtgccgagcgcgcgtgtccggcgccgagtccggattcagcggcgagaggaactttggatagtggtgttgttgggcggcggcgatggcggcgaccgaggcgaggtaaaacagccttccgcccggatcgctgtcaacaatagcagcgcccgagatccggtgctccccgcatggacgactggctcaagcaagacgcgaagttgaggttgcacggcaggggcggcgggacaacctcatcgcggctcctgaagctacatttcccccagcagcaaaacgatgtaccgccgtgagggtgagtgcaccctgcttttcagcaaaatgtaccccggcacgctcacacgtagcggggagaggagaatgccggcagcgacgacatcgagacctcacatctcgtcgagaatcgtgtttgacagcaaagagatgggcgagcgcagagaagttgcgctgctgcttggtgcttgtccacggtgccggcggtgcagacacgcttgcttcagcttggcgtgaagttcgtatcatagtgtactgtacgcaggcgtttcgttctcgccgggcacctgggagtttgacctccgacagcagcttttcgccgttgctgccaactacgcttgccacgggtcagtctggaccgatatgccgaacctcgcaccggcgagcgttcggcgatggcgacgcagttaacgcggtttcagcgcgcatgacatcgtcctcgatgcagccctgaaaccaaagcatgggcgacgtggacgagtggcagttaggccggcagtgacttgctccggaaacttcaggggtggaaggtatcgaaaacaacgcttcgtcggaagctgggtccgcaatggacaccaggaacagagcggtggtgccgatgcctggcagccacgagagccgaacgtcgtcaagtcgagtgtataaaaacatctttggtgctcgctttgccgagcctcaaacgcgtgccaagcagcatagacggcatgaaactgcgctcgctgtcgccagcaacgatggcacagctctcatagacaggtgctgctgctgcagtgcttcggggtaccaggctttccgctatcgtgcgtggtgctccactccatctttgcactcttgccagacattcctacgtgcttttcaaacgaagctgtgctggaagtcgggcccatgggatactagatcccagtagtgtcgatgttgaagtggttttgcgcttggagcatcaaaatttgcgattggactaaatgctctgattgttctaaatctacgacgacttaactttgtgcatcactttaagtgagagctaatggctttagcgctctaaatctgcgacgaatcaaatttgggcatcacttttttcaacgaatgttcaaatatgtagttttagaaggtcattttagatagacaaaggacgccgacttcggaagcctcatgccgctttctttcgtccaggctgatcgacgaactgagtttgctcctgctgttgctgcacagatcgtggagatacactgtactgcactggcgcttcttcagcgttcggcaatcgccggccataaagaaaagcacgtgctcattgacgttgatcgcagagaacgggtgtcgtcactactgtacctggctagaagctcaaaagcgggtggccccggggcctcgatattgactgcgctcgttggaggcggctcgagccgctgaagtgttcgccttctgatcaaccctcgacgttaaatgcctacagccaggcagactgtatcaaggtcgggatgacatcggcctgagcaccgcgacgacgcatccgccgtgcgccgggcacgcgccttaggaacacagcatcagctttcacggtctgtttctactgcacttgcatgcagacaaattgtggggcgcacaatactgcatcctctttagaagtccgtctcggtgttttacagtctgacactggtacagtacatatagtatatattcgggagggggccatgcctccgacggcgtacgtgtgcggatcccctaagctcgaccggcgcgtgcctcgcaccaccaccagaagcctgcgattggcagcctgcgtgcgtccaccggcacggcacggtgcagcgcgacgggaccagctggctgtcgcggaggacaccttttggctcaagatacgcgcgagagtgggacgacggccgcaccacccgaacgggcaccggccaatcgcgtgccggctcgcgcgtgcctgcaccgtcggaaggcccatacaaacggcaaggcaaaagcggggatgcgctcggcgtgtgccggcaggcggatccggccaatcggacgccgcgccgccacgcgccctggaactttgggcctggaactcggcggcttgacacgctcgccagagtcgcgttgacgccttccggcttgttgcgccgtcattccggccgaggccacacacgatgcagcaggactgcgatgccgacagctccgagcacttctgaattggagcggcagcgcgcactcgatccattgcgcgcgtcctgcaacagtagcaactacaactgcacctaatacacacgaatcgcacaatgagcggcaagtcggacatctctttcctgctgaacccgcagccggcgggctaccgcgagctgcgcgccccgatgccggcgcccatgtccccgccgcacgccgcatcgtcgctgctgcttctgggcgcgtgcatcgcgccgctcgacaagatgagcagcgtgtacagcagcagcagcagcggcggcggctgcagcaagaagacgctgttgccggcgctgtctctggctgcgctgtgcgaggccagtagcagctacagcagcggcagcagcagtggcgccgactcgagctgcagcgacagcgatgacgacgacgaagagaaacaagagcaacaacaaccgaccgcggcgtccgcgccgacgaccgccacgaccaactcgaagacggacgcgaccacggagcagacggctacgacccgcacccccgccgccgccaagaccagcaagcccaagaagccccgcgcgacccgcacgcgcgtgcgcaagaaccgcacgccgccgtgccaggtggacgggtgcacgaacatcgccgtgtctcgcggctgctgcgtgcggcacggcggcggctctcgctgctcgatggcggggtgtccgaaccgcgccaagctgtacaagaagtgcttccagcacggcggcttcaagacgtgcgcgaccgagggctgcacgcgcaaggcgaagcggtacggccactgctggtcgcacggcgggggccgcatctgcgagacccccgggtgcgacaaggtgtcgacgcagggcggactgtgctgggcgcacggcggcggcaaccggtgcaagctggagggctgcagtcggcgctcgtaccagaagtacggctactactgcgtggaccacgcgtcgctgagcaagggcgagccggcgtaagtttgcgagcaagcaagcatgcgagccagcacttgcttgaacgatcatcaagtgtcgtttgagcaaggaagctggttcattcggctgtggcgaagcctacgaagcatgtgccccggatgcagttgtaggcgggtacaatagttgaaatgatccctatttatctggtagttgcaaatctgaagcaataaacttttattttctcatctgtggttttacttaggcatacttcgaagtacttaccatgttccttggcactgcagagcgtcagccacgaaaacttgtccagttatctacttcttgtgtggttgcataatttttgaatgcatgctgcaaaatcgcgaattgctctactgcactcccacacgagcctacaccaatttggcgccgcaagactgcacgtattcatccatcacaagatgccacacactcgcactcttcgtaaaaacaatcaccgtggtgccatcgcaagggagaacttctactgtcgtctggtggggataattgagttatccacacctgaaatatccgatattgcaccgagggacgaggaacttcctcgcatttacaacgatcaaagagaatgtgcggagccaaactagaggcaaagctttggtctgggaggacagtgtagacttcatttgtgtgcaaacgtggggtaggcaagaattatttaacatgaaaattggtggcaagttttcaaaccctggtgtagcgccttttaaaaaatggcgaagttgccgtgcaaaagacacgagagaagttaaaggcgcggtcggccaggggctttgcccccggccgagcccattgaggtcatgcattccagctagccattggcgcgaacagacacaggaaagagagcaatccgccgtcagttgttatttcattgattttgagtaaattttaacttacaagataaaatacagctatcctagttatgatttttcaaataaatttcataaattcaataactgctcactacagtgtgtggtacacactacgggtacagtcgacattttggggggaaaaactgatgatttgattaactcgttattggcaataaccagttaatcaataacttattgctggttgtacgctcttgggaaactgaattgttgatcttccttgggtgaattgggtgtcagaggtaatgattgttgaatggttgtgatgggatattggattggagagtgtatcaatttattcttcttcctttttcgtattgtgcttttcatactttttggcacttcggactgtaactcgtacgacttatcgagcgcgacttatctataaatcgtactcgagtacgaattgctataagtcgtggatggtcgatgagcactaagtagtgcacaaacgccatctgcatgatttagcacatccagcatggattagcatccgtttggcacttttagaaagtgccatttccgagccaaatcgggctcgaagcacgacttgagcaacttgcattcaaagcctccatgatttaccaataagtacgaacactaactagtgcactaattaggagggcaaactggatgcaaatcacaatacttggtgggattttaactccggccaagagcgtacttcctgggacctttacgcagtgggctaccagcagccccgcgacattttgggaacaaccagccacgaaaatgtaatatataccttgtgatgttatggtagccataatctgtggactatggactcaggcgacatttgccaattaaagttggggggggggggctcccggtcgctgaaataaaattggttaagtgttttggccagtttagtagaaccagtaatattgcagaaataatgaaatacgtgctttgattggctataaaactcttaccacgcgtttccatatggtagttcgatacttacaaagaccagtattattccgctctactaaactgatcgcagcatactgtaggtatgttttcttttgcgcgctacaatagcactttcgtagctgctaactgtgtctggattggtgcacatgttagagcaaatcaagggctttcattgtgtacacgttttatctccaaaagattagtagttttcaagaaaatacttttcaaagtcaaaaattcagcttgctctactaaactggccaatccccttaggctgttcagccagctaaagctgtcctcccagtataaacgggaaatgtattgtgctttgcaaacgttttgtcgttttgacttggagctctcctcgagttatataataaatcaagatcgatttaataaaacgaggtcaaagaaagggacagatcgatctatttaggccggctaataactcgacctacgccaatccaaatcagggctcgaggtcgatctgctcgtggatttgagtagaacgtggtcgatctacggtaaatcgatcctttttgcgttttcaaaagcgtaattcgaggtcgatctaagcaaatcgagatcgtccatgctaccccctctgatttgtgccctgatttgtggaccggcctacctcgatctaggccataaaacggggcgacattttatctgcaaagcacaataatactgcgtccacaactgcaaggtacacccaaaaagctgaaaagctgcgctaacaaaggcttcgtggtctggtggttgaccctgggccaaataggcgcttgcggtgcgtgtgcttctgaaatgactgtagaaaatatacttatatacctgcttggcacgcaatgtgccattggcgggacaacttcacctgccccagtcaaagtttagtctttcttgggctcgagacgctgcaccaggctggcgatcaacttggcttgctcctcgcggtctttctgtcgctcctctctctcaaactccagctccaactgtcggcgcttcgtgcgctggatttcgatttgaagttcgagtccgcgctgcttggtcttctcctcttcttcacggagccgggcttcgttcatcttttccaactcaatgactcgcacttcgctcggccgtgctgcgaaggcgtgctgcatcttcaacagctctgccatggcctgctgcgcggtaaccaagtcccccgtgaccggtttctgccctgcaggtgggggtgcagccactgaggcaaatgcaggggcagatgatggtgtgggtgcatgctgcagccccactacctctgtgcgctccgccgtagtttcagcaaggtgtgcgtcatcgggctgcaactgctctggctccgaccgaggacgaggcagcacgtagacttcacgtcgttccgactcaggctcaacagcttctgagctggcacggcgcttgccgagccgcgagctggtccgtggttcgggggcttccacctttcgttctcctcgcagctctccattgtccgcagcttcgtcggagccgtggcgggcgttcgtcctcggatgctcgtcaatctccttgaccaactcgctcatcagcaggcgatagggactgtcgagttcctccgcgccctcggtctcggccgactgctgccacaggcggtggcgcagcaccagcgtgtcgaagcgcgtcttggccgtcgtgcccttgatcgggcgcatgtggaagtccgggtgctggttgagccgctcggcgacgccgtcccacgtctctccgatcgcgccgtgccgcgccttgaacggcgtgtcctccttcacctgcaccgcgagcaggtagtcctcgtctcggccgaaccgctggcgcatttttccctccgcggggctcccctcgttgtctccatcgcggcgcggaactcccctcggcatggtaatgaacccttttttagcgatcttcttgcagttggagcaaaattcgagtcattcggaatgtggagtactgccacaccgaattgatgtgtcagaacacattttgtagcttgaccccatcatgaagagcgcagtgctggtcacgggggcgtcgcgcggcttcggccgctgcttgacgctcgacttcgcgcgtctgctcaagactcaggacctcgatctggtgcgtatggacactattgtattgctgcaggcctctgcgactgactggcgagtgttgtcggtgcttgttcatgcatttgatacactacgcagcacttgtgggctcgcagtgagggcgacctcaaggagactgagcgcttggcgcggaacgaatgggagactgcagccgccactggcgagctgcgctgcttcgtgcagtgcgtggacctgggcaacccggctgactacgcggcgaaggtggaccaggtgctgctgcagttggcggcgcagagctacgaccgcgtcttccttgtgcacaacgcagggtcgttgggccagctcggagtcgtacaggagtgtgcctcatccccgacggagctagcgcagtactgggagctgaacgtgacgtccgttttgtggctcaacaagcgcttcctggacgtcttcggggcctcgagggacgagttgctggccgcgactcccgctactggtgacgagaagacgcagctggtgatcgtcaacatcacgtcgctgtgtggcatcgagcccttcaagacgcacatgatgtactgtagtggcaaggcggcgcgcgagatgcaccaccgtgtgatcgcgacagagcagcaggtggtggacaaggtgcgcgtgctgcagtactcgcccggaccgatggacacggacatgcagaagacaatccgcgagtcgccgtgtgtggaccctgagcttcggaagcagttcgaggacatgaaggctcaaggcacgctgatcccaccagcccaatcttcgcagcgtggagtgaaacttgctattagtggggactacgagactggagcgcatgtggactattatgacttggattctccaaccaaggagtaagtgggaggcttgtgccgaattggtgaattgcagaagtatgccctcgtggtcatatcagtagatattgattgttaatgtggcatttgttactgctactgacgcaagaaagatcgctaggtgattcgcttccgacaacttacgtgtcactacgcagttctgtagttagatgaaattctcgggttgctttgaccgagagaattggcgctcctgagtcagtattcgctctcttcaaggactgtttggttgaatacttctctggcccacataagaaacaacacttcggttttctgggcataactgtttacaaaaaaatcgtttggcgactcgcaatacctcaaccgaaagctgcgcatttgctccgtttcacgctatgatttaaaaaaatctagcagcagaaagaaaaggaaacagccttttatctgaagtccgttttaggcaacattaggttttttagcgaggtgccgtcaaaaattagcgatattagaaaataaaatatcaccgtaatcgcgagtgactgctttacccttatgttcggttgtcgatgttgtagcgcctgttggagacgagttagaagggctacagttttgaggtttttctacgcgattatctcgacatgcgcagacccatttattttggccaatagtaagctgaaacagttgattatacccaatcatatgttacatgtggttcacatcaaattgaggtttaatgccgaatgctgtttcttaagtgggccagagaagtacctcataatgacagtctcgccgaatgcacacacgaacctggcactcgaattgacagctcacatgccaaaggagcccgtagtagtttttctaatcgcgataaaacaaagctgaagcaaaccatcgtcaatggacgccgcgttgcatcccattcagtaccgtacaagttgcagtcgagtttacgaactccccccaaataacgagcatgaacaactcgggaaatacagaagttacttgagattactttcgctaggcttatcgccaaataaataaggaccacttcaactattgtacccgcctacaactacatccggggcacatgcttcgtaggcttccgccacagccgaatgaaccagcttccttgctcaaacgacacttgatgatcgttcaagcaagtgctggctcgcatgcttgcttgctcgcaaacttacgccggctcgcccttgctcagcgacgcgtggtccacgcagtagtagccgtacttctggtacgagcgccgactgcagccctccagcttgcaccggttgccgccgccgtgcgcccagcacagtccgccctgcgtcgacaccttgtcgcacccgggggtctcgcagatgcggcccccgccgtgcgaccagcagtggccgtaccgcttcgccttgcgcgtgcagccctcggtcgcgcacgtcttgatgtcgccgtgctggaagcacttcttgtacagcttggcgcggttcggacaccccgccaccgagcagcgagagccgccgccgtgccgcacgcagcagccgcgagacacggcgatgttcgtgcacccgtccacctggcacggcggcgtgcggttcttgcgcacgcgcgtgcgggtcgcgcggggcttcttgggcttgctggtcttggcggcggcgggggtgcgggtcgtagccgtctgctccgtggtcgcgtccgtcttcgagttggtcgtggcggtcgtcggcgcggacgccgcggtcggttgttgttgctcttgtttctcttcgtcgtcgtcatcgctgtcgctgcagctcgagtcggcgccactgctgctgccgctgctgtagctgctactggcctcgcacagcgcagccagagacagcgccggcaacagcgtcttcttgctgcagccgccgccgctgctgctgctgctgtacacgctgctcatcttgtcgagcggcgcgatgcacgcgcccagaagcagcagcgacgatgcggcgtgcggcggggacatgggcgccggcatcggggcgcgcagctcgcggtagcccgccggctgcgggttcagcaggaaagagatgtccgacttgccgctcattgtgcgattcgtgtgtattaggtgcagttgtagttgctactgttgcaggacgcgcgcaatggatcgagtgcgcgctgccgctccaattcagaagtgctcggagctgtcggcatcgcagtcctgctgcatcgtgtgtggcctcggccggaatgacggcgcaacaagccggaaggcgtcaacgcgactctggcgagcgtgtcaagccgccgagttccaggcccaaagttccagggcgcgtggcggcgcggcgtccgattggccggatccgcctgccggcacacgccgagcgcatccccgcttttgccttgccgtttgtatgggccttccgacggtgcaggcacgcgcgagccggcacgcgattggccggtgcccgttcgggtggtgcggccgtcgtcccactctcgcgcgtatcttgagccaaaaggtgtcctccgcgacagccagctggtcccgtcgcgctgcaccgtgccgtgccggtggacgcacgcaggctgccaatcgcaggcttctggtggtggtgcgaggcacgcgccggtcgagctcaggggatccgcacacgtacgccgtcggaggcatggccccctcccgaatatatactatatgtactgtaccagtgtcagactgtaaaacaccgagacggacttctaaagaggatgcagtattgtgcgccccacaatttgtctgcatgcaagtgcagtagaaacagaccgtgaaagctgatgctgtgttcctaaggcgcgtgcccggcgcacggcggtttgacacgcgcaattgttgatgcgtcgtcgcggtgctcaggccgatgtcatcccgaccttgatacagtctgcctggctgtaggcatttaacgtcgagggttgatcagaaggcgaacacttcagcggctcgagccgcctccaacgagcgcagtcaatatcgaggccccggggccacccgcttttgagcttctagccaggtacagtagtgacgacacccgttctctgcgatcaacgtcaatgagcacgtgcttttctttatggccggcgattgccgaacgctgaagaagcgccagtgcagtacagtgtatctccacgatctgtgcagcaacagcaggagcaaactcagttcgtcgatcagcctggacgaaagaaagcggcatgaggcttccgaagtcggcgtcctttgtctatctaaaatgaccttctaaaactacatatttgaacattcgttgaaaaaagtgatgcccaaatttgattcgtcgcagatttagagcgctaaagccattagctctcacttaaagtgatgcacaaagttaagtcgtcgtagatttagaacaatcagagcatttagtccaatcgcaaattttgatgctccaagcgcaaaaccacttcaacatcgacactactgggatctagtatcccatgggcccgacttccagcacagcttcgtttgaaaagcacgtaggaatgtctggcaagagtgcaaagatggagtggagcaccacgcacgatagcggaaagcctggtaccccgaagcactgcagcagcagcacctgtctatgagagctgtgccatcgttgctggcgacagcgagcgcagtttcatgccgtctatgctgcttggcacgcgtttgaggctcggcaaagcgagcaccaaagatgtttttatacactcgacttgacgacgttcggctctcgtggctgccaggcatcggcaccaccgctctgttcctggtgtccattgcggacccagcttccgacgaagcgttgttttcgataccttccacccctgaagtttccggagcaagtcactgccggcctaactgccactcgtccacgtcgcccatgctttggtttcagggctgcatcgaggacgatgtcatgcgcgctgaaaccgcgttaactgcgtcgccatcgccgaacgctcgccggtgcgaggttcggcatatcggtccagactgacccgtggcaagcgtagttggcagcaacggcgaaaagctgctgtcggaggtcaaactcccaggtgcccggcgagaacgaaacgcctgcgtacagtacactatgatacgaacttcacgccaagctgaagcaagcgtgtctgcaccgccggcaccgtggacaagcaccaagcagcagcgcaacttctctgcgctcgcccatctctttgctgtcaaacacgattctcgacgagatgtgaggtctcgatgtcgtcgctgccggcattctcctctccccgctacgtgtgagcgtgccggggtacattttgctgaaaagcagggtgcactcaccctcacggcggtacatcgttttgctgctgggggaaatgtagcttcaggagccgcgatgaggttgtcccgccgcccctgccgtgcaacctcaacttcgcgtcttgcttgagccagtcgtccatgcggggagcaccggatctcgggcgctgctattgttgacagcgatccgggcggaaggctgttttacctcgcctcggtcgccgccatcgccgccgcccaacaacaccactatccaaagttcctctcgccgctgaatccggactcggcgccggacacgcgcgctcggcactcgcgcgtttaaatgcaaaatgcagcttctgggcactcttcgcaatacgtttctcgacccgagctcgctgggtctttgttgtcggaccaacgccgccgccgccggagccggtggttgctcacaacggaatttgctctcgacccgacagacctctcgccccattgatcctcgcgccaacagcaccatgaacgccaaggctgacatcgccttcctcctcaacccgaaggcgcaagtgcagatgctgaactatcagtcgccggtcgaggacaatgtcgcgacacctcccgcgacgccgcctccgatgtcgctcttccgcagcctctcgccggtggagcgcttgcccacgctctcgctctcgcccacccggaagctgccggcctcgtacgagcccatgtacgagaagcggttcagcaacgtccgctgctacggggacgacagcacccgcctgccaatgctgtctctcgttgcgatgtacgctgccaacagctccaactctacgagcagcagcgtctcgcgtacgtcgtcggtggcaggcagtgagcacagcgaagaggaccacagcacaacatcccagcatctgacgaccaaccagacccacgccggcaagacgcgcgtacgcaagacgcacaccccgccgtgtcaggtccaagggtgcaagaacctcgccgtctcccgcggctgctgcgtccgccacggcggtggttcgcgctgcgtggtcgctggctgctgcaagcgcgccaagctctaccagcgctgcttccagcacggcggctacaagacgtgcactgagcctgggtgcaccaagaaggccaagcgctacggccactgctggtcgcacggcggcggccggatctgtgaggtcccggactgcaccaaggtgtcgacccagggcggactgtgctgggcccacggcggcggcaaccgctgtagactggagggctgcagccgccgctcgtaccagaagtacggttactactgcgtccaccacgcgaacatgagcgcggacaccgacaacacccacttcaacgcgagtgtgtaagaggtaccttgactgtagttgactgtgtgttatttatcgcaatacataaagtggaattgaatgggtctatgagtaagagtgcaccaagcaccaaagacggctttggtcaatggttctgatctactagctagggggggggggcagtcttcttgagtaccaggtacagcctcgatcgagtgttagctccgacaggcatgcgctgcactcggactccgagactcggatgaggggtcacaccgtggggctaaccgctttggcggtgatcttccaagtcgaaatccatgcggtcatgctccgagttcctggcatcttgtgctgttatacttagtattttattggactgaggtttggatgcgttgcgggggatgcaaaccaaagcgcatgcccctcgcataagagcatttgagccagagcactcagatcgttgttgctcagagctggccggcggtgtcgccgtcgcagcgtctgcagcgattaaaccgattaaagtcggcctatccaccgctagatcatcagaggacgcccccatcttcaccttcgtctcgcttcaagctcgccaagcagaggcgctaagagcggcaggctgctttgaaagcaagcgtcgcggaaaacccgcctgcttcgtcgcgttttctgaagtttttctggcggtgctgcgtgtctacagtagatacaagggccacgttgcgtgtttattaacgccctattaaggccagaaacagcgcgcgctgctcggtgttggatgcgagattgctcagcggccgagtggcgttgctccgctttgcgctggcaatgctcggcccaagcgagcgacaacgcagcagttggtgagcttcaagacagcttggctgcgacaggagacgcaagccatcgacttgatacagtccccgaccggcaccgcctccttcatgaatgccaatttgagaccgagaatcagatggccgcaccaacgataaacacgcgccccaaattgatttggccggccgtgcgcatcgctctcatctttgcgccggtggtgtatcgaatctcactattcaattccccacatccacaccacaaccaccaaagcaatgtgcaaggcggacatctcgttcctcctgaacccgttggcccaggccccgatgacgcccgatcgagcgccggcatcctcggcgtcgctctttcacagcctgtcgccgatcatgagcagccccgagcgctctccggtgtcctacgcgagccatcgccgcttggcggccccgtacatggccccgctcgagcagcgccgcagcctcagcaagcgcgcacgcccgaccatgtccatggcggcgctgtgctctgagtgcttcagctccagcgacgatgagctctccgacgcctcggtctcggccagcgcgtctcccccgcgcaagacgcactcgcccgcgtgccagatcgagggctgcaagaacctctccgtctcccgaggcctctgcgtccgtcatggcggcggctccaagtgcaccgagcctggctgcaacacgcgcgccaagctctatcagcgctgcttccagcacggaggctacaagatgtgcaccgagcccggctgcaccaagaaggccaagcgttacggccactgctggtcgcacggcggcggtcacatctgcgaggctcccgagtgcacgaaagtgtcgactcagggcggattctgttgggcccacggcggcggcaatcgttgcaagcacgagggctgcaatcgtcgctcgtaccagaagtacgactacttctgcatgcgccacgccacggcttaaagcggccagtaccgatagctagttaggcatttagactatttaattgacacctcattccagcccatgctcagtgttttcggtctttgtctagccggcaggtagcggaaggaggcgtgtggcgatcgatgccttcgctgttagcggtacatggcaaaagttcacttcaaaagctgaagtttggcccgtactgtaggcagaaactgaagttagacgcaaagacgctgctttccgatgggcgcaagtcgcttttgagcagcgaattaccgctgccgacagcgcttttaacggacgtctaaatcggcgactgctaagacacgcgcgacggaggcgagcaagcaacctgcatcgcgctgctgcgagcctctcgtcgcgcgccaatcagaccccaggcatgttgaacctgtcaactttgccatcgtcagcgagagaggcacgcgtgcttctcttcggggaatctcccgcctgtcactggtcttggcgcggcgctagtgtagggtgagctcgtgatgctgggccggccgtccccggccagatctatgccccgccgcacccccgggactaaacttgaacgtactaaggcgcagactaacgctgcgcgcatgcagacgaatttaacaaaaaagccgcgctgccgtgaggtggattgctcagctatcgctgccgatgcctctgtcgggccaacgccacaatgctctatcctctcggagtcgtgtgaccttgctgcgctgacaaccagttgcgcgtgtctgccttccgaaacgaggaagttctagaacctcgacgcgaaggaggtgatgcgggatcgcgcctggtagcggatcctggcgctgccaagaccaccaggctggcggtcttgggcgggttagcagcgctaacttagcacgatttgactggcaaataacttgtccgcgtttctcggctcttgcgctggtcaggttttctgcttggttgttttctgcttggagccgcaaacagcaggacaaccgtcgttaagccaagccactcagtctgttcacagtcctcggcgatccattttgccaccggctcacatttgaatttgcctttcgcggagcattgcattagaatcctcaccagtatgcactgcaaggccgatatcaccttcttgctcaacccatccggccaggtggatagcaccgcggaaacgccgtgctcgaggcccgaccacgccgacctcgagttgacagggacctcctcgccaccaatgtcgctgttccgcagcttgtcgccggtcgcgagaagccccgactcggctttcacgcaccggcagacgctggtggcaccggacatcgtgccccgcgagaagaaaatgaccgacctccaatgttacggaagcggcacgacgcggctgccgatgatctccatagctgccttgtgcgtcagcagtgactcaagccccagcggcagcgtcgacggcgaagacgctcagtccgaactggcatcaacttttgaatccgagcgcatgccaaaactttgcaagacccacgctcctccgtgccaagtcgagggttgcccgaacctctctgtctcccgagggctatgtgtgcgccacggcggtggctccaagtgcacattccccgggtgcaccaagcgtgccaaactgaaccagcgctgctttcaacacggcggatacaagatgtgcactgaacttggctgtaccaagaaggcgaaacgctatggtcactgctggtcgcacggcggcggccacatttgtgaatcgcccgagtgcaccaaggtgtccacgcaaggaggctattgctgggctcatggtggcggcaaccgctgcaaacacgagggctgcaaccgccgctcctatcggcggtacgactactactgcatgcgccacgccaagaccaagatggtgtaccaagtccgtcaattcggatgagactagatgatagctagactaatttattcaacgcgcactctgcgatgccccgacaatatattagcgccttcgtgcccatcgagttcgtgtgtcctcagggcgtctacttcagcggtgcacacgtacacgatcgtgagcaacgtagacgttgaaggtgctgcttcatttgacatggcagacaaggcaaggcgctgtgcagccatgtacatgctctctttgtcggccgtgtacatgtagcaagtagtaaggcgattggcgagactaaggggccgatatactcacaacaaagctcgtgagtgtgtgttgcatgccagctcaggttggccattaacaaagcgaaagaccgagactctggagcgtaagcgagcggattgcattggtctagcggtcccggttatgtttgatatatccacttcaactttgagcatacaaaaatcaagtggttttgtcagttgatacagctgcgaccttaatctgccgcggagcagctagacacgcagcgcctgcccgagcaatcaaggcgatgccgcgcgttgacgatccacacggttgaacttctgcgctgtcccgtcgcatggctgcttggtgcgtgcggcgtgtttcttgcggcaacttcagttttgcgagacggcgtctatgcggcgccatgccgcacgaagctcgtgtcaagtaaatccgccctggaagcgaaggctccgacaaagacaagctcggcgccgtcgaggtccgcgggccccgaaatacatggcggggtactcgattgctaaaggctcgaggatcttgcgaaatcaacgcaaaatgccctgcgggtcatgtaggttttgccttggcgtgctatcacctaggtagcgaaatgcgtgagtgttgttgttcggtaagacatcgccgacgcttcggatgcccagtctgtccggcgagaaccttgccgccacatgccttcgggcgcttgagttcgacggcactatgcactccacttgtgttgtgtgcaaagtgtccacacggataagcacgcacccaccgccggtttctaaggaagtcgtgcgaggtggggcgaagagcagtacattcgaaagcttagtccagccttgaggaggcgccttgagagccgcgcgcagattatcggaggagcgcggcggcttgagaggtggctctgaaaggctaccccactataagggcttgcttttgaaggaactgctcttgcctacatacattagaagacgaacagagtagttagtagtttgagaccgcatacttacctttagccgaccgtggcagcgccgacaatggcgaccgtgcccttcgccgacagtggcgctcaggcgtagccgacggtggcttccgtgtcctgcgccgacagtggcgaccagaccatgcccttcgccgacagtggcgctcaggcgaagccgacggtggcttccgtgtcctgcgccgacagtggcgtccaggaacataccgacagtggcaagcatgaccgatgtgtgctggccgacattcccatagcggcggtacccttgcagacaggcatgccgaaaatacgatatatatctattttctcaagttaacgaaatacgtatttgtttgtgtaccaaggagagaagaaataaataatctgaagaccccgtgctgacgcagtaaattattcagtaaattgctgcaatcgtgttaccttcatgggttcttacaaacactgcccacggtcgccacatccgtgttaaggttgctgaacaacatcattttagcataaagggaaaatttgatggcgttaacacaatgaaaattaggggaagaaacttctcaatcatgaaggatatattcaaccgcagaaataagatctagaagttttgatctaagctggaataaataccgaataaaccaaggaggtatacctacaataaaatattgattccgaaaatacaaatatatttccgggcgtatttatttttcgggatccctgcttgcagacgtccgtcggagatcgggcgcatcggcgccccttgtgactctgctcgcgcgacgtcgccgctgcctggtctccggccgaggagggtcttgccacgaagcgccacggacgcgtgcccacgccgatcacccttcgccgtctgcgtcttgatcccgcgcttgtccgtcgccgcccacatccagccatggacccgtagccgcccgaggagaaatcgttggcgagagcgagtttgctaccccacgtagtaaaagcgagcgaggtctcgacggcgaccccgctgctcttctcctcggcgcaaaactacgaatgctactgctctaactactggcggtaaaccttgctgacggtggggctctgctccgccacccgctggactaaattccgccctacatacggtcacctgcccatctaactccatgcccgccgaggctggatgcttgacctcttccgtcttccagaaaacataattatcgcctcgcaggctcgtcgataattccttaactcttaatgtcgcgtgacggggctcgagtcatgcgaggcccgcgcaggtctttgaccctttgttaggaggcggcaagtcgtgtgccgtcggcagtcaccgaggctgcatcccgtcctcgcaagacccacactcccccctgccagatcgagggctgcaagaacctctccgtctcccgaggcctctgcgtccgtcatggcggcggctccaagtgcaccgagcctggctgcaacacgcgcgccaagctctaccagcgctgcttccagcacggaggctacaagatgtgcaccgagcccggctgcactaagaaggccaagcgctacggccactgctggtcgcacggcggcggccacatctgcgaggcccccgagtgcacgaaggtgtcgacccagggcggattctgttgggcccacggcggcggcaaccgctgcaagcacgagggctgcaaccgtcgctcgtatcagaagtgcgactacttctgcctgcgccatgcgcctcgcagcttggtttcgacaactgcgggagctgctagcttgtagatccaggtaggtagaatagtttagattagacggtatttaattaacacgaattgcgttgcacgcacgcttcttgtcttccagtattccgctacatgtttttttatccgtccgggtacttcccatctataataccaagtgctgttgtcgcaatggacttcaccactttttttccttcaagaaaaatattctgccgttaaagaaaatagcaacggtatagcaaccaaaacatcttcatttccaaaatgtatagacaaccgaaggctggtaaatacttggacaaccacactagaaaattttattcgatactccttctctgccccccccccccccccgaattctttttcggccgtcggagaaagcgtgtcaagacgccgcaatagctgttactggtagatgtaactttgccactcgaaaggtagcggctctgccggtagtggagtacttgtattggtccacagcaactgccgcactggacaaacaaattcagtattttcagcgctgtcacgctcattgctcgaaggcttcaccaggaaatgatctactggaaggctgcttgtatcagacttgcgggtggaatcgatggcagacgtgggcagcctttatcaattctctgcagaggggctagaagtttgaggtcagtgtctgaccgtcagacctgcgggcctgaacctggaatggcccgaatttacggtaacttacatcgtgctgaactaccctctctataggcattatctgtgttttaagggtaaatatgtaccaaaacaacggtactatagtttacaaaccgtactttgtacatacatattgacccctccattaatcatgtcctgcttattattacttttcaaaaggcattatccttcgacaggctacgaacagcaagagcgttacaaaccaacgacgctttgctcgaaggcaggaaggaggaaggacggcgctaaagctcgctcgacagcaagccaagccaagccaagcctcgacgactgcggcactgtagcgatggcggaccggcgggcgtcctccacgtgcgagagcttcctgtccaacgacggcagcgacgacctggtcgtgcgctacgtgtggggcggcgaggccatcggcctggagctcatgcggccgccgccctccagcgccatgcacacgatctactggggcgccgacccgctgggggtgacgctgggcgtcgaggagacgtcgcgccagatcatcgtgacgcgctccagccgcgcggacgtgcgctcgggcgacgtgctgctgcacgccggcggcgagcccttcacggagcagaccttcgctcagcgcatggcgctgctcaagcaggagcacgagctggggggcgcggctatccccttcgtgttcgcgccgccgccgccgcccgtgcgcgtcaagaagtgcgcgggcgcgctcaaagaggccggcgtggacgccagcttcgagctgcgctacgtggacggccgcgtggtgcgctacctcgagatgaaggagctgcaggtgctcattcgcaacgcgcgcaagccctgcaccatggccttcgtgcagagcagggagaagcagttctacggcgtcctgcagcgccaggagcagcagcggcgcaagcagcagcaggtcagccaggcggcgacggccagtgccggactggcattggcggccgccatcgtcgtcaacatcacatgaagaagaaacactggggagctgcgtgctgtctgcactacgtatagggcagcgcgcagtcggagcctacacacggctacatttgtacagggaaagcagcggagcagcgtagttcataacctattcaaagcaaattcattttcacgactacgtagcgcaaggggtcagccggtttgtttagggaagcctatcggacactgacatgcgctgtcccggacgacgtgagtcacttcggcatggataatttgcatcctcatcgtgagtgtagcacgccactcgaccaaggtctcgatcaatgatgcaaacaatcgcccgtaacgctagcgcaacgtggcaccttcttgcaccggaattgagcgcttcgaagtcgtctctcgattgaatatgtctggctcgactgtatctatcgtcttgcagcacgagagtttttaagttgagagtcttaatttcagggtaacttcgcattaaccccaaattagactgggttttagtattgtggctttcatccgttttggcaaatcgggtggtccaagatccgatatatcgggcccgatttgctggagggctccgatttagcaggaggggctgagggaagcaaactatatctggcccgatttgcgtctgggggctgcgagttgcgaagcaggggccagaaatgccgcttttcgccggcaaaagggaccgccgcgaaaacatgtctggggccctctcagatcgaggttgcagcggccgtagatcatcacacaggcgtttagctggccatagtgctacggagtggctatatacagtgtactattgtccccaatgtcttgcagttctaatgcgtcatgagaggtggggaggtatggccaacttggaatgcctcccctctgagccttatgctaccaactcaggtcagatatagctaaattggactaaccgatcatgtaggagctccattttatataaatcggactccgatttaacacatcaaatcgggtggcaaaatatttgaaaaccacaatattagttgcttgcgtatcataccagacacaattggaagatgctgactcgcggtcgcctcggtatccgccgtgcggcggctgctgggcgccatgcctcgctcttccagggagcctaccgcctggccccttgcgtcacggacctcgccccgtcgtctgcagtcgcgtgggggccgttggtctcctcttcgcgctgcttctcgcagctttcggggctcgaggacgcttccacgcctgaaaagccctccagagccaagttccgccgccataagaaggccaaagcctcgaacgaagagaagctaaggcagagtgaatacctgaccaagctgcaggccagtgggggcaacgccgacgcggctcttgagatcctggcggctattcaagcggccgacggctcggggctctcgaaggaggtggccacgacgctgctgacgaccttcgtcgataagaacagggtcgacaaggcgctgcaggtgctggatctgtcctacaagcagaagatgtggctgcgggcgcctcccttcgaggcgctcatcaccaggagctacaaatcgaagcactacgacactgccctccaggtgttcgactcggtgcagcgcgccaacttgagccccagcaacctggtgtacaccacggcgctgctggcggcccacaggttgagggacagggagcgcgtgctcaagatcctggagcagatgctcaaggacgccaagccctactcgtctcgagccttccaagtggctctgagcgcggcggtcaagtccagactgcaccagttcgtgctggagttgatggagtgctccaaggcgctggatgtcgagctcacgagcgagcactaccacttcgtgctgaggagctatgccgctgtgggcaacatggaggctgccttgggtactcgagacacgctgcagcagaacgggttcgagctcaccgacgacggggtccactggctcgtgcactgtgcgtgcaggacggaccaatgggacctcgtgcaggggcttctgacgccgccagttccaagtgctgacgatggtgagggggtggccaccatggcgatcgccttcaacgcagcgatcgcggcctacgggaacaaggagcgctgggccaaggtggtcgacgtgtacgagctgatgccggagaacctccgcccagagctgaaaggctggcacctgggtgctgtcatcatggcgcatgccagagctgaagacaaggaggcgaagctccgcgcgctcgaaatcttcaaccagcacaaggacaaggtcagcgaactcgcatacggcggcgcgatcaccgcgttgctggacacggagcagttcgacgaagccctggcccttgcggaaaacatgaagcacaaggaaatagcttgggggaagaacgtgtaccaagctgtggctttggctctcatccgccgcggaacagctgaagaagccgtgcagttgctggagacgagcgttcgctgcatgggggatgaaccggacggctacctcaacatcatccagttctacacggaccggcaccctcgtcctgatgtggagcaagcttagacgatcaacttgctaatcaaatacagcttcaagcacgttgaaagagcgagaccagggacaggtgagttgggacgagttgagggagaaaaactaacgtgctcattcttcttcttggacgtgtttggaagaagatgccggcgaaaagcaagaagcccgcgctgcagcgcgctaaggagctatgtgggaacgacacgcccctcgaggagggtgatcactggttcgcagtcgccaaaccgtggtgggacgactttcaggcctgcaagcgagccgaggatgcaccaagcgtgcgtaacgacccgctcattgacaagcagctcagctccaagacccgcacggtgtcagttctcaagccgaatctcgaggagggcccagacttcgtgtttatgccggagttctcatgggaggtgtttgcgcgcgagcttgatttcgactgggagatccgacgcgaagtcgtctacgagcgaagccgccagcagatggagatcgaagcttatcccttgacgttcaaggtttctgtgagcttaaactggtatgccagcgtgcaatttcactaacgtttgatgttgtagattttctattggagtagcggtgaggccgaggcggaagagctcgtcgacgatgcaggtcgagccgtggttgttctcgccagtcgggcgcatacgcttggacagttgcttagcgaagtgtggctagctgcgtcggatgacttccagcaaaagttcccccagtttctgagtggtatcgacacaacttcctcgataaccagacccgccgcgtcggagagtcaacgtattcgtgcctgctaccgcactatccgcctagttgatggcgaggaagtgtggacaccgatcgagaagatgatgaagcgctcacgcacaccgccaacatccttgcgactgaaacctagagctaagaagcgccaggtccgtgacgatgatggagagaatgcggatgaagaagatggcgacgacgaacagagcgaggctgagtttgatgaacacgccgaccagctcaagggcgaccgtagtggtctatcggcactgatgaatacgaagcttgtcgatctccgcctggataatcggagcgagaccgctagcggcccagcgaggattcatgagctccttgtcgagcagaagctgcagggtgctgctaatagcggggagatggagtggccgagccaaggcctcgagatgcagtggcgaatggacctggcaaaaggcgacttgctggacgccctggacacgtcgaagacgtggtttgaggctcgaatccttggtgcaagacgcaacaaagtgcacgtgcactatcggagctgggaacccaaatgggacgaatggatcccccgaacctccgctcggatcgccccactgcactctaaggtgcctaaatggcgcagcaccctacgttctcactcgttggtgcaggttggcattgaggttccaactcttcaacacccgaggtggcgtaacgctacggtgatcgaggtggtccccagcaccgacggtgaagtcacgcaggctcgggcggaggaagatggcgctgggctcagggtgcacgtgcaggtggacgaggacgacatttggctgcctgcgaacgacgacttgctctgtcggccaaacacgcacaacgagtcgaagcccttgagcaaggtcgaacggcggctgcttgcccacgatgatacgttgccatccgattcgtccgaagttgcggaagaagtccccgcggagcccgaggaggaagaagaggacaatggtgaagaagaagggcaagacgagcacgaaggacaggaagtggtggaagtggacggagatgaagatgaagagatgggtctagcgggccaccatgagggctccagctctccaccattgcgtcccccgagggcgatgcaagtgacgacggcgagtcgttaccgaatggagctacgaactcggacaggtcctgctcgcgatctgaatgcaagcttcagccgggttcaagtccaaggcttatcctctgcgggtcgaacgccagctcgaggccggagccgaagcagaacccgagtctcaagtgatgagacctccccggagcaagtatcgccagcctccccgccgagtgcctctcagctgcagacactgtgggcccaggtgggcaacgacctgcaagcgctgcatacgagttggggtcggcttggtgagagtctcatggcgttcgtcgacgctcacgcccaggattgagacgcaagcgctaagaaatcaaggatcgaggcgttcaggaggttgggcttcggacaaaagtaagctttgcgtttaacaccgctcgagtttacggtgaaaaatagtttttgtaattgtcaagccagctccagtgttgggagtcttgttttcgtaacttctcttgaagcaccacttttctgctttcgaggttgcccaccagccattgcactgcaatttaagggcaggttgcagcgagctccaaatgtctgcgggcgacgcattgcaatgcgccgagctatttgccgtctcaactgcgtacagtacatgtagttgccgttgaagtgccggccggggatcgtgtttgaagttgacgaccacgatcggcgagctgccggcacgcggctcataatcaacgcctcgccggcgtctaatccgcgtcgaggaagtcgccgccagctgccgcagcgccgcagctcctgcgcgatgcagcctggtggcaggttttcaatcggccctcctgaagtccatcgaccgacggcggcactgtatcgaatcgacggctcgactagaaaatggtccggtaccgactccttcttcagctgtagccacctcgcgcgtccagcgtagcactacagtcctgcagcagatgctttcgctgctgggcttaggctcacctggccttgacagctctgcaaagttgccagcgtattatccgcccgtgctgctgctgccttagccacagggcggccagaagcagcttcaacgaccgtatcctgcgcgagtggcgagctacagcggaacaaagggtgagaccgctttgttggatcgcgccgccatgccaactgaggggcccagctctcggtagagtttggtaatcacgtgctgcgagtggtttagcgcagccgcaatgcgctgcacgtccggtggtgagagcatggcgatgcggcttgcacttgagtttgtctccaccaaaatgactgcagaggccgccccgagagcagccacagtgtcaccaacgaggccttgacttgacgtttgatggcttgacgcccgctgagctgacctgaggcgcgggccgccaccaacagcagccccccccccccatacagttgagttcccgcagtgaggcatcgtgcggcgaaacgcagcggcgacagcaacgacagccaggtcatgagagagcactaaaagcacaccgtggtccttgccgtcgcgctgcgcgggtgcactgcacaagtccaccgtcaactcagcgtcgtggagatcgcgggaatcaagcgcatgacactgaggccagcgcagcacgttgaaaatcagctagcgcgctcgtaaatcatgtcgccgcagcgcgagaagaagttctcttcgtgtcgttgccttgacgcttggaagtcacgagtggtgcgactactgttagtcaagcggtcgacagcttgttactaccctgctgagcgtggacctagctgtaaaggctaaccgacagcttgaagcactgtcggagctgcacgacggccacagcacggggatagtgctttctggctgcatctgccctcgaataatgtagtggccgctcgagcattggaatagttgcggtgatagctgcacctcgagtcgatatgtgcgctgccactactggtgcgtggctatccaatctaatgaagccatcgccatccgacctgttggcgatggagaaacttggttcctccccatgaggaaattgagtgacattctccagctcgccaatgcggtacttctctggcccacataagaaacaacacttcagttttctggacataactttctacaaaaaaatcgtttggtgactcgcaatacctcaaccgaaagctgcgcatttgctccgtttcacgttatgatttaaaaaaatctagcagcagaaagaaaagagaaacagccttttatctgaagtccgttttaggcaacattaggttttttagcgaggtgccgtcaaaaattagcgatattagaaaataaaatatcaccgtaatcgcgagtgactgctttacccttatgttcggttgtcgatgttgtagcgcctgttggagacgagttagaagggctacagttttgaggtttttctacgcgattatctcgacatgcgcagacccatttattttggccaatagtaagctgaagcagttgattatacccaatcatatgttacatgtggttcacatcaaattgaggtttaatgccgaatgctgtttcttaagtgggccagagaagtattcaatgagtccgggacacaccacgacttgtcatgcgcatcagtggatacacatattcagcgccaaagtgctcggctgttgaggtcctgtgagccgaatcatataatactctttaaaaatgatgaacttcaacttcagctgtgacccacgggatttgcacacgtcgaccgaagcacgcagtaccagtggtggcgagtattcatggggccgctgccataaccaccactactgcagtcaactcgccggccggagagcacattatttgtgctaccacaggatgcagtttcctgactgcctaccaattctcaattctcgcttcttagccattacagtcagtcgttccacagcaaccgaactgcttcaacttgctggctggttatcccgcccttcgtcgccacaagtcttagcgtagcaatgtaaatgacacatcactggcaactactgtatggccgtcaatgcttagcgactcatgccgtatcgctcgctgaccacaacaccgacttaacgacgcgaagagaacttcttctcgcgctagctgattttcaacgtgctgcgctggcctcagtgtcatgcgcttgattcccgcgatctccacgacgctgagttgacggtggacttgtgcagtgcacccgcgcagcgcgacggcaaggaccacggtgtgcttttagtgctctctcatgacctggctgtcgttgctgtcgccgctgcgtttcgccgcacgatgcctcactgcgggaactcaactgtatggggggggggctgctgttggtggcggcccgcgcctcaggtcagctcagcgggcgtcaagccatcaaacgtcaagtcaaggcctcgttggtgacactgtggctgctctcggggcggcctctgcagtcattttggtggagacaaactcaagtgcaagccgcatcgccatgctctcaccaccggacgtgcagcgcattgcggctgcgctaaaccactcgcagcacgtgattaccaaactctaccgagagctgggcccctcagttggcatggcggcgcgatccaacaaagcggtctcaccctttgttccgctgtagctcgccactcgcgcaggatacggtcgttgaagctgcttctggccgccctgtggctaaggcagcagcagcacgggcggataatacgctggcaactttgcagagctgtcaaggccaggtgagcctaagcccagcagcgaaagcatctgctgcaggactgtagtgctacgctggacgcgcgaggtggctacagctgaagaaggagtcggtaccggaccattttctagtcgagccgtcgattcgatacagtgccgccgtcggtcgatggacttcaggagggccgattgaaaacctgccaccaggctgcatcgcgcaggagctgcggcgctgcggcagctggcggcgacttcctcgacgcggattagacgccggcgaggcgttgattatgagccgcgtgccggcagctcgccgatcgtggtcgtcaacttcaaacacgatccccggccggcacttcaacggcaactacatgtactgtacgcagttgagacggcaaatagctcggcgcattgcaatgcgtcgcccgcagacattcggtgctcgatgcaaattgcctgcaggcagcaatgaattaggctggcgggcagccccaactagtcctgtcaaccttacctcacaaacctccaacctcccacaggttaaggtaaggttcctaacctccctaacctccccctatacaaaactcagtataatggaaaaagccgggaccaaacccccagccaactccagtactacatgtactggagctggtagtgggcgtacagtaccttgggcgtgactgcagcttccagcctgcacgaacgcagcatattgcaggacagatttctaagcctcaccgtttgatctaccaataatgtgaacttctacagtgtagtagtaaaacaatacaccttttattgtgcctttccatccatttacttcagaagtatcgatgacgacagcgatctgtccaagttgcggaggatgcgaatgccgctattaacgtcgctcgtagctctttaagacggtggtgggtcacacctgaacctgtgcctctgtacctctgtacccgctttcatataaaacgagaacgtctagccttcggcttaacgaagccttgtcagcgtggcaggaggctagatgttctcgtaggcaacagtggacagacgccagtttgctgaagaaacactatcgacatgtgcgaggcgctattattcagcgcgtcagtggggaacggtgctcgttgatcatccaggtcgaccacttcaggctccagtcgagccagcttgaggtacctttgtgtcgttaaggaggttaaagcgaaagtttagaaagtccagtgagtttggaggtgggttaaggttaaggaggtcaaggtaaaggctatgacaggctgtcattgacagctgaggttgacaggactagccccaacgcgccacacacatcctgcacaaatccaacgcggtagtccgcggtcatcggccgctgagtcctgctgctcaaccgcgggtgcacgccacttgaggcgcggagcattactgcccgcgtccgcctttttggcgcgcgatcaggcgccgagctccattcgttcgtggcgacttgacgttgctgctgttctctgctggcgaggcggaagccaccgcgcgcagatggctcaaggctcaccgctcggcggcgagcgttgttgagtgcgccgagcttccgacgccgttcttattcagcctcatttgcgtccacagcgtgccctcgagcggaacaaccttatctgggcgcctggtgtccgaaaccagacaagccacggccttgcgatacccggcggcggtgcggcgaggctgtgcaactggaccgcgaggcacctgcagcgccgcggggccgctggccgcgctggcgccagcgattgttgctttctcatgggcccgcatgtctccaagtgcttgcagagacgcttcgtcgccaccttcgcgagccgagccaccggcgccacccaacactggggcggagcaatgctactctccgcgcggagctctttgctagagcccgggcgccgcacttgacgtggcccggatcccgcccgtaagcaagcgcttgcacctccagtgtccgctggccaaggaaagtccctcgcgatctgcccgcggacgtccctcgcaccgaagtggaggacgctttctcgagaattacacatcggctcgaccgaactgcgagctcaggaccgcatcctgctcgagactgactgcctccggcctccgtgcgtcagtccaacggcaactgaagctggacgtgagtcgcgcctctgcagggtctcattgaatgagtcattccggccgcaggactaagatgcgaatttgggtgcgcacccgccgtgacaccaagtccagcgtggtgctggcctcggccgtgagttaacgcgccaagcggccaagcgctcggcgggccgggcctctacgagcgaggcagcttgcgactcgcgctgcgacggcgtgcctgaccttcagcgttggcgcccaccaatctcgagcgcgccagtggcgcatgcgagctacagttgactcgggatccgcgcaataggttctgagttcgcggcgagccacgcttgtgggcgactacggttttctggtgatcctctccgcgtgagctttgccaccgcggtggaagtcttacaatctctgccgacgaaaatgttggcaaatttacaaatactcgctatagataaccgattttgtgtggagttcacctcacacctgcagcgcgcaacgctgcaagccgtcggccgtggccgcagctgtcaaaaggcagttgaggccgcggttcgtcaacgccgcgatgagaggcacgcccgcgctgcgtcgagctgtcgcgcggggcttttccagcgagattggcgtgcgtgcacggcggcccagctcggtgcgtgagacttttccatcgtagaagaggccgagggcgctgtatctgcgctgcaaacagcgcggtggtgtgtcctgcctgccttcctcccagcaagctgttttgcccccctccagtccgtacgtggcgccgcgctccaattcgaacaagttgagcgcgtaacatgcatgggtgggtgccttcaagcagcagctttcagcggcaatagcatcaggactcgactcgctcggctcaagcgctcggcaggaggtggagtccacctcctgccgagcgccggtctcaactggtgaatttcgccaccctggcccggttcatcactgcaaacaaaggtgaggggcgagtgtgaggcagacctgggcgcgtcaagtgccggtcagcgccaggacgcagctttgcacatcaaagtgaaaagtggctggcggcatatcctcaatgatcatggcggccttacttacagcaagacgatagtggtcagcgcgggcgttctgcacgcgcaggtgggtgagagagaggctcgaaagtcttggcgcccggtctggcgcggacgagtctgggaacggaagcgagcatcgggtttcgtgtgtcatttcaactcgcgacccaagtctcatttgcgaatcggccgcgtcgagcgcagacgcagcaagactcagacgctcacaaagactgcgcttcaacaagatactgcagtagcaatgccgctgacccacctgccgtctctcgctgccccgcagccccagccgctcgccgtgctgccgccgctgcgcgcctcacaccagctcaaccagcacttcccactgcagccgcagtactcgccccagcacgccttcctcccgcagcagcagcagcagctgctgccgccggctccggccgccgccatgccctcaaatgccgacctcactctgagcggcccgctgcgccgcggcaagtggacgcgcgccgaggaggactacgccgccgccaccatctcgtacttctgcgacggcctgctggccatccagtacggcaccaccctgcgcgggtacttggcgcaacagctgcactgcgaccccatgcggatctccaagaagctgctgcccggctcggtcttcgccggcatcaagatcaaccccaagatcggccgacgagcgtactacccgtgcgcgcaggactcgcccgccgcggcgcgctccaaggagaacgcggccatccacctcactaccctccgccaggctttcatcaagagcatcgaggaggaggagcaagcgctcgaggccgccagcaacggtgtcgttgtcaaggacagccccaagctggctccgacgcagagcagccccaagcctgcggcctccattgcccgcaagcgcagctacgacgacatcaacagcgtcgtccgagcccagcagcagcagcagcagttgcagggctacccgtcatctgtggagctcacggagccacagatctcctaccacttccagcgtcaggcagtgccgacgctcttcaactcccggtacgctccggcggccacggccaccacgcccgtggtgtgcaagctgcccaagttgaccgtcacggacgacgtctcccgtcgtgcgtcctactcaacccagccacgcagtgtgtcccccgtgacagtagcaacatcgacggcagtgctgccgccactgcgtgtctcgctggtgcgatcctccatgtgctagactagtggagtgagctgtgtgttctttttggtggcatggcgtattagtgtagataagttagcgacacgaagtagtgtactacaaacgatcaataaatgctcggcaggaccggcgtaatgatatcaagactttcaatgcttctgacagctcttgcgtttcgagcggcgaggtcacgcgcgtctacagcattgcaatgggaccacgggaaagctcgatgcacctgtgcaacaagtgcaaccgattaccaaccacagcgtccaacgcagtgcaagcaccaaccgtggccgccccgctgcagctgcagctagcgtggcgggcgttgcattcaagtaaaccaccaagttcaatcaagacaggacgagggcaacgacagccacgacacgagctaccgtcacgtgcggaccaaaaagctccgagccaacaaccacgacggggtgcaatgagacgcttgtgggtggtccccccgctgcaacaggaggaaccttcgcacgcacgccgatatgaaatgccgcgtggtgggttgggaacgaatgtacattggtttagagcaacgctacccggtcaagtcgtgaggatgcggcagcgtgcgctcgtggctcacggcgccgactatcgtgaggtagtcagcgcgttcttgcactattccgcagcttgacttgacccgcgtgactcggttcactcgcggtcacgctagtcgccggttggaaaggccgggatggtcacactgccagctttgccgcacgagtcttccgagtgaatatgcggcggacaggcgcggcgctgggtcggcacgttgtgctcgtccttctcccagcaggtgaagacctgcgagaagagcgtggcgtgcttggcgtcgctgtcgtcgccaccgcccgcgtgcgagcactggcacttgagcgccgcatccccgaatgccgcgcgcagcttctcgacgtccacctgtccgccgacattgtcctgcacgagctgcggcgtcggcgcgagcgtctcgttgcgctcgaggttgatggcgtgcgtgaagtagtcgatctgcttgagccccgagcacgtgccgtggcgggtccactcgtgcttccagaagtccgcgtactgcggggacgcctcgctgaacttgacgtcgggccagtactggtgcagcgtgtcgatgccgagctcgcgctcgatcttgtcggcgtcgaaggcctcgcccgagcagaagctgggcggcgcgctgcccgacagctccggccacagcccgtgcagcgtcaggtgcgagcgccaaaagctctgcggcgcgcggcagcccgggtactgctgctccttgccgaagcagaaggccggctgccagctctgcgccaggatgtacatgtcgaaggcgctgggcggcttgggcgccagctcctgcaccgccgcgtcgaacacggccacgcggtgcgcgtcgtccgccggcgcgccggctgcaaccgcgccgacgagggtcgcagccatagcaagcctggcgaacatggtcatcggaggagggacaagaagaggacgagagaagatcgtcttgaggagatctggcagaaatgatcaccggaagtcattatgataggtcggcagtttttctgtgacggccgaatcttatacacgacaaatactaatttataaagtgtactttgagttcaaagaaggagaaaggtatctacttcgaagtacttttcatttaaagaacagatcactaccacggtttgaagattggagtaacgcaagtgcggcgtcatacagctctctactacacgatagacttaccggtagctcattcgcacgtcggagtttggccttccccaagtgtggaagcttgtagagattgccgccagcctcctccaagattgcccgcatgcacgcctctagcgtaagaaagatgttgtccacagtgtcgggtttgagctcccgaaatgcgtcctcaaccgacgctataagcgcatcgatgcccttccttggtagacggtgttgaatgctttgcattgaagcaaaaactcccaagtcaaggcaattgagctcgggtgagttggctgtttggcataacagcctgatgttccaccctccttctgttcccgctgcgacaacgtccggatcggttggcgacacgtgcggcttcgcattatcttgttgcacgaagatgaactggcgacggtccttccttggccacttcgacttgatagctgggaacaccttggtgatcagatagtccttgtagacatttcgatcgacggtatcaagattgcgtgtgcaaatttcccccttggctctattcttgctcttacgttgtgccttatacttctccgtgaaagaccagagccccaccttgccatcccatctctgcttacggtgtggatcgtacctacacagaaatttcatacagtgtcaaaggttatccacagtataaaattataaaaatatagagacttaccgagggcgtgcgagtgctgccaggaacatggtcttgggtatgaagcgcttgctcttccaggctcgtggaggcatctcttcaccgtcaaatacaaggtaggaacgtctgttgcggtctgcgtagaaccacttctcatcgacgtgaaccacgttgtgcatcgactcgaagcgtaacgtcgtgttgtcgacgaacgacagcgcatgttcgacacggtccagcttgttctcgggggtcagcgccggcttgataaacgtcgtacgacgccgtaccatgccttccttcacagcttgtcgtactaggtgccgggagagccctgaagcagccgcaacgcgcctctcaactgccctatcctccacaggaacactcgccagcttcgtccgcacttcatctcgattcttacgcttcctgccgctgttctgcttgatccggctagcccactcgccaccaggaacaccagccaccaccgcagccgtgtagcgcttccaaatagcgctcaccgtggtcgggtcacgcttcacatgggccccgacgcgggcgaaggctccgcggggtagaactccattgtcacttagcttgaggagcttgtcgatgatgcctctgcgctccatgtccactaggttggccttcgtccggccctcttgatatcggcttgctacttggagcggtaaaatgaaaatgacgtgggcaacaggaacccgtttgagatgagcggagattaagagctttctttttgtccaatccgcagctttatacagcacgtagtggtggagttattggttaaaatgtctgtttccggtgatcatttccaaccagaggaagtagctgttatcttgggggggggtcccgagaagtttctggggtctaatggagctgggaacaattgacgccacgaagaagatcaaggatgcgatcggcgaaaacttgcccgcaggtaccatccacgtgctggtggactctcccctccgacagttcgagtggtggattaggcttgacatgaagacaatcgccaactttcggccgtacgaggaagttgcggagcgtctgaaggaccaccctgaggtcaaggagctggagcatcaactattgagtctggttcctggtatgcgcacacttccgtccccctttgtcatgatcgagtgctcgtcgggcatggggaagacgcaaatggcgttcaatctccaggcgagtggagcgttcgatgtcttccacatcgtccgcggcgcggcgggggacagcgagcaggcggtttacaagccgcttcacggtcgatcgatggcgtccaacgtgtgagccaagagggacgcggatgaaatggaaacggggaagctccacgagttctacgaagactgcgagcggcacctgtacgcgttcctagtcgcggttctgcgtggggacatcggctttagcgcgactgcttcacgcgctgatgtcgaagacgagcttaagctgcgccgagaacgaggagacaaaccctgcgtcttcagacgctgcgctgcggattacattgcggccagcagaacaaggcaagaaaaatatttgcgcgcgatgaggaacgtgattctctcattcaagctgccgctagtggtcagctccacgagtggaactgggcgagggctatcgagctctcatgagggggtgatgccattcaagtggtgcgatgtgtatccgtctctgccaggaattgctctcgatgaggcctacgtgaggctgaataacgtgcctgaggagttcaagaggctcatacagcacaatcggccgctgttctcggattctgcgctgataaagactgacgagcaccgttcggacgatctaggagacttcctcggcaacattgttgaccgtttgggaccagcgatccgatataatatatcatattatgaagcgaccaagcgaagcctttgagctgggccagtttggattgctgctgggctgcgacttcagtttggaggacgaatgtatcggcgtggtgaccgcccattacgcctgcttgaaagtgttgaagcctttcatactgaaggccaccgacatattgtggcgagatgggaagcagtggaagccgattggggcgtttccccctccagagtccgacatggtgctgcacctggccttgacttccggcaactcatttcgtcccctgaagcagcccttgtatcagatgatggagtggccagccatgaagaatctgctagtgttcgacaccgaccgacagcgctcaggccaagtcgtgaggtttgaggcacttgtaacggcttccatcgtgctggccagcagaagcggcggcgtccacggggctggcttgtcctcctttttaggtgtaatgctgtatgaattgggcgtcgcatcggagattgaagccacgcagtcttcgttggacgtcgaggatgcattgttgagccaagttttggttccgttcctttcgcctccgaacgcggcgtggcccgactggtttctgagtgactgggaaaatacttccgcagagttcgcggatttaacgtttacagccgacgcgaaatcggggcgactcgactttcgtgtttcttccggcgccacttccttcgagtgttcacgttccatgaacctgtcggaacttgatcaagttatggatcgaatcccctctgagtcttcaatccatttaattgttacgagtgcggtggatggggtatgggaaacattgaaaccggccgccgacagcgacagagcggcggcgtgcacccaattctatcatattactaacggctcaggagggcagcctacctggacgccataccccgcaatgacaacgacgtccgattctgatgccggagggaagaagaagacagttctcgtgcttgagctagcacctggagagtgaacggtgcatcattgcttgagtttgatacttttgtgactttgggaagtgttttgaacgcaacaaattgattgataaaaagaattggttagtaacgatcagaaattgggtcaccacgctgtagtcactgtcttttaaacaaagcaaccagtttttttctctctctcagtcaccaatttgacaccgtgaacacaacacgaatgcatgagcacgagttttcgagactcaaggacgtacagtttccggacgaagtagctgctctgggccatgttctggagctcattgacgagatgctgatgacacgcgaagaggctgtggttaaagctgcaggatcaaatcaactggcatggctgcaattcctcctagagacccacgatggcgatctcatggatgctgttgccagtgccgcagcaaacgggttcatggaggctgtgattcgcatcattcaagagaaaaactagcaagaaagtgacagtgacagcgacagcgatagtgacaatgacagtaacgacaatgacaacggtaacggcaatggtaacaataagttgcagtcggtgagtctcgacgtgcgtccattattaaggaacgcaattgtggcagcagcacggagtgggcagctccctatcgtcactgatttcttgccgcgacttgcggggtccggtcgcattagtgacgacatacaagagatgcacgacgcaagttggcaagctctgaatgagggcgcggcgcatggccaccttaatgtggtggtatacgtggtggagtttgtgactcaatggggttacattgaggactacacttctagtgatgagggtgacgctctactgctggcggttcgcggcggacatggtcacgtggtgcagttcctgctgcaagggtgcttaatcgcgtggaatactcaagacgcactgcactggcagaagctcttctctttgagcaaaatgaggtggccgagtggatatgcgatctgcaggacgctggggaggaggcctcggaacttggcactgaataaccagtcggagtccatgcagccacgttgcatattgatttatgtgttgttttcgtagcaagtctaggttcgagagaataaagctgcattgctgcttcccgtattcctgaacatcggctagatctcacgaatataaccaagaattgaacgagcaaagcaaagcacgtagtaagcgagctcactcgattggtatttctaattccacatgcatcgacgcatatcctgtcttaagcctggtcgcgacgaatgtagaacagaacatacgctcgagaggacacggcatcctccgctgacgcctcgctcgtatggctgtcgttgaagttgaaccagcactcgttcaccgggttcttcgccacggcagtgtagtgtccgccgccaagaccccccatgtgctcggaaacagcgaacagatcataaatgggctcggaaccgttttgcggcccgatcacaaactccgagaggtccagaccttcgatagggaactctaccagcgtcgaaatcttgtcacggtgcatgtaaaacgagttctgagcgtaccggaagcgcttcaggtggaaaatcagcaccttggggagcgaaaacaggtcgaacttcttgaacgcgcggacgtggtctttgcacttggggcaataccacgtgtctgcttcgccaagctgttcccgttccgtgaacttggttaagcagtttagcagcgtgatcggctcagccttggacgagattttcaggttcttcatcgagtcgtggaggtcgatccgttttgctgatttttcatcgtaacctcgttggtagctggcaaaaagtaagcacaacaacaataagttagtatctttacctagtatacaactgaatgccacccatttcaagacgtacccattgcgattccactccagcgtaaagctaaatggcttgttcgagctgtcaggaacgtccacgggctcgtcgtccctcgggagatcactgatgaaagtggtgcctccgttgggttctgtgacgtgcaggcggtacggcaactgctggtcctggccgcatccaaactctgttctggagtccttatcagcgtccttcgtggccacaagacggtgcacaatctgccacactttcttgtgtatccgagcttttgaccatttccggtcgatcgacacaagaagcggcgtattgaataactccacttcgacccgtcgctgcttcggaccatatccctcctccacgagcatatcgtagccttcggaattgttacgtccatccactggtgacgcaacgggagcttggtggagcaactcgacgaggtgcatctgctttgcaggctctgactcagtctccagcgtacctaaccttctacccgccgtgggagggcggatggtaggcgacgaaaacgagtagtcagtcagcggcagctcgagctcatacgcgtggaggacgccgtcacgaagccggtcaacgtgcatacgatccgagtacgccttaagaatccggtggttccatacttcgacgaagaaaatccacgccaccgggacgcttgacagttgactgagcttctccttcgcgtcttgcagggtgcacatgtcctccttggggaggtgcagagcgtacttcatcggaatatcaccattagcccagaacagctgcacttggacggtcaccgtttccttgttcgggatcggcaccgacaggttcatgtacgggtcgaacgtgatcgattcgttgccgcagtccgggttcgagcacgtcacgtggctgcggagttgccccatgaagttgtcaacaatgatactgttgttgcgacgaacaaactgctgccactcttcctgtgccacctccgggtcttcgcgaccattcctctcaacaggcttggtgtatggcttcgtcttcacacggttgaggtcttcatgaaggccatccagcaagaaattcatcagttcctggctatcctgttgctggtaccccgcgaactggggcgcgtactggccgatcacggacttcaggctcgttggggcgaccgctgtgaattccccgctccagatcttgcgcagcagcgacgcgaactcgactgccatgattcccttcatacccagagggttatgtcggttaatctccttggtgaagaatgggctgccagtctccgggtccttctcgaggaaatagtcccgaagcggtgctgtgtttatcagacactgcagcatgctgttcataaagcacgtgttgcccaggtttctcagccccacgacgccctcaaaggtaggccggcccttacccgcttcactcccgtagtcgcgcgcaaattggttgtatgaagaggccggcgagaacgaagacactggcgacgtaacagtcgtgctcacgttcagagccttgtgcgtgcccacaggacacaacaactcgttttgggcgtccacccacctctttgatccgtccacatcgagctcaattcggagcgagtcgtgcatctccgacttcttgagatccgtaacacgtccaattcgccattcaggataattctttcgatccacttccttccccacgagcacctcgtctccaaccttaaaggcgcgccaatttgggaccttcgtgtgcagcggcgcgatgcgcgccgacgtgcgggtcagccactcgtcccacttggctgtccatccacggtaatgcactttcacctgcgtgtcgctcaaatcgatcacgcgcgcttcgtaccacttcttgtccgtgtccaaagcgtcgatcaactggttcttctccagcgtgaaccgccacgcctccgcctggacttcactgtagaacttgccgtgtctccagtccagcatctctctgccaggttccgctgcaaagcgtccttccaccagcaaatggtgcagcttctccctgccaggcttgtagtccctctgctccagctgcagctcccccacggaggtgctttccaccagaatatcgggtctgcgggggcttgagaacccgttggcgcgtgactcggccaccacggcgtctctcagtggggtccagggcgagtcctcgtccattctgtagcatacctgtacagccttgccgatgtcctcctcgctcacatcactgaacatgttcctgagcgcaggcgtgtcggccgccgccctccagatcttcatcttgagctccgagagcgagcacttctcgctggccgtgagcaccagcggcttctgttcatcatccagcagctccacgggcgcctcgaggcccgtgcgccagcccagcacctcgaaggccacggggttcacctccacgacgcgggtcttggcgggcccgcgggccaccacgggcctagcgatctcccagtcgaagccgaattggtccgacagctggttccacacccgctggctcacaaggcggtagtccttgccctccacctgcagcaacagcagcaacaatagcgtgtgagtatctttgagtgggcatatctcgggctccagagctgcgttgcggctcgtaccagcatgggcttgagcacggcgacctcgcgcgcgcagctgctcagctccgcgtccagcagcgccgcgttctgcacgcgcagctcgtcgttcccgcgcggcgcggcgtcgtccgagtcctccgagtcgtcgtccgtcttgtccgcgctgtcgtcgcccacgtcgcgcccgagcacgcgcgcccaccacgcggaggacacgaggaaccagtcctcgccctcgcgcagctggtcctcggccagctgccgctccagcgacgccgcgagacgccgcagcgcgccgccgccggcagcgactcccttgtgcccggccgccattacgtgtgcgtggcttcgatttgtgaaaactgggccgttggtttccgaaattggactcgtttggtccggaccaaaatcgataggactttttcgtggatctagccaatcatcttaaactcatgtcgcatatgtcacatttcgaccagtgtagccatattgttgaagatggctacattccaacggacatctgatactgtcctgagcaagtagaagaaatccagtcgtctccatccttggcgaggtacaacttgaggtcgtctgctcttacgttgtacaggattttcaccgccttctccatgatcttggcaggcaaacaaccgaccagctcatccgcgtccacggatagacaagccacgttggcacgtacggcaactaacgcgcagaccacgaagccagaagctcatctgtaagtctcatgtcattggatcaaattggaatcacatggtgtacccgtttcaaggtacagcatcaaaaccgtaccttgagaactggccatactcgtggatcaccgcgtacgtgtgcgcgttagtcggcttcgaggcgcatgtcgtggtcgcccaggctgactcccaagagttcgtgtgtgcgatactggataaagtcctggtcaaggcatctaacgccttggtaggcttccaaacgatagagcttcatctatatctggcgaagatcgatgacgactggtacacagtcaaaatgcagcttctgggcactcttcgcaatacgtttctcgacccgagctcgctgggtctttgttgtcggaccaacgccgccgccgccggagccggtggttgctcacaacggaatttgctctcgacccgacagacctctcgccccattgatcctcgcgccaacagcaccatgaacgccaaggctgacatcgccttcctcctcaacccgaaggcgcaagtgcagatgctgaactatcagtcgccggtcgaggacaatgtcgcgacacctcccgcgacgccgcctccgatgtcgctcttccgcagcctctcgccggtggagcgcttgcccacgctctcgctctcgcccacccggaagctgccggcctcgtacgagcccatgtacgagaagcggttcagcaacgtccgctgctacggggacgacagcacccgcctgccaatgctgtcgctcgttgcgatgtacgctgccaacagctccaactctacgagcagcagcgtctcgcgtacgtcgtcggtggcaggcagtgagcacagcgaagaggaccacagcacaacatcccagcatctgacgaccaaccagacccacgccggcaagacgcgcgtacgcaagacgcacaccccgccgtgtcaggtccaagggtgcaagaacctcgccgtctcccgcggctgctgcgtccgccacggcggtggttcgcgctgcgtggtcgctggctgctgcaagcgcgccaagctctaccagcgctgcttccagcacggcggctacaagacgtgcactgagcctgggtgcaccaagaaggccaagcgctacggccactgctggtcgcacggcggcggccggatctgtgaggtcccggactgcaccaaggtgtcgacccagggcggactgtgctgggcccacggcggcggcaaccgctgtagactggagggctgcagccgccgctcgtaccagaagtacggttactactgcgtccaccacgcgaacatgagcgcggacaccgagaacacccacttcaacgcgagtgtgtaagaggtaccttgactgtagttgactgtgtgttatttatcgcaatacataaagtggaattgaatgggtctatgagtaagagtgcaccaagcaccaaagacggctttggtcaatggttctgatctactagctaggggggggggcagtcttcttgagtaccaggtacagcctcgatcgagtgttagctccgacaggcatgcgctgcactcggactccgagactcggatgaggggtcacaccgtggggctaaccgctttggcggtgatcttccaagtcgaaatccatgcggtcatgctccgagttcctggcatcttgtgctgttatacttagtattttattggactgaggtttggatgcgttgcgggggatgcaaaccaaagcgcatgcccctcgcataagagcatttgagccagagcactcagatcgttgttgctcagagctggccggcggtgtcgccgtcgcagcgtctgcagcgattaaaccgattaaagtcggcctatccaccgctagatcatcagaggacgcccccatcttcaccttcgtctcgcttcaagctcgccaagcagaggcgctaagagcggcaggctgctttgaaagcaagcgtcgcggaaaacccgcctgcttcgtcgcgttttctgaagtttttctggcggtgctgcgtgtctacagtagatacaagggccacgttgcgtgtttattaacgccctattaaggccagaaacagcgcgcgctgctcggtgttggatgcgagattgctcagcggccgagtggcgttgctccgctttgcgctggcaatgctcggcccaagcgagcgacaacgcagcagttggtgagcttcaagacagcttggctgcgacaggagacgcaagccatcgacttgatacagtccccgaccggcaccgcctccttcatgaatgccaatttgagaccgagaatcagatggccgcaccaacgataaacacgcgccccaaattgatttggccggccgtgcgcatcgctctcatctttgcgccggtggtgtatcgaatctcactattcaattccccacatccacaccacaaccaccaaagcaatgtgcaaggcggacatctcgttcctcctgaacccgttggcccaggccccgatgacgcccgatcgagcgccggcatcctcggcgtcgctctttcacagcctgtcgccgatcatgagcagccccgagcgctctccggtgtcctacgcgagccatcgccgcttggcggccccgtacatggccccgctcgagcagcgccgcagcctcagcaagcgcgcacgcccgaccatgtccatggcggcgctgtgctctgagtgcttcagctccagcgacgatgagctctccgacgcctcggtctcggccagcgcgtctcccccgcgcaagacgcactcgcccgcgtgccagatcgagggctgcaagaacctctccgtctcccgaggcctctgcgtccgtcatggcggcggctccaagtgcaccgagcctggctgcaacaagcgcgccaagctctatcagcgctgcttccagcacggaggctacaagatgtgcaccgagcccggctgcaccaagaaggccaagcgttacggccactgctggtcgcacggcggcggtcacatctgcgaggctcccgagtgcacgaaagtgtcgactcagggcggattctgttgggcccacggcggcggcaatcgttgcaagcacgagggctgcaatcgtcgctcgtaccagaagtacgactacttctgcatgcgccacgccacggcttaaagcggccagtaccgatagctagttaggcatttagactatttaattgacacctcattccagcccatgctcagtgttttcggtctttgtctagccggcaggtagcggaaggaggcgtgtggcgatcgatgccttcgctgttagcggtacatggcaaaagttcacttcaaaagctgaagtttggcccgtactgtaggcagaaactgaagttagacgcaaagacgctgctttccgatgggcgcaagtcgcttttgagcagcgaattaccgctgccgacagcgcttttaacggacgtctaaatcggcgactgctaagacacgcgcgacggaggcgagcaagcaacctgcatcgcgctgctgcgagcctctcgtcgcgcgccaatcagaccccaggcatgttgaacctgtcaactttgccatcgtcagcgagagaggcacgcgtgcttctcttcggggaatctcccgcctgtcactggtcttggcgcggcgctagtgtagggtgagctcgtgatgctgggccggccgtccccggccagatctatgccccgccgcacccccgggactaaacttgaacgtactaaggcgcagactaacgctgcgcgcatgcagacgaatttaacaaaaaagccgcgctgccgtgaggtggattgctcagctatcgctgccgatgcctctgtcgggccaacgccacaatgctctatcctctcggagtcgtgtgaccttgctgcgctgacaaccagttgcgcgtgtctgccttccgaaacgaggaagttctagaacctcgacgcgaaggaggtgatgcgggatcgcgcctggtagcggatcctggcgctgccaagaccaccaggctggcggtcttgggcgggttagcagcgctaacttagcacgatttgactggcaaataacttgtccgcgtttctcggctcttgcgctggtcaggttttctgcttggttgttttctgcttggagccgcaaacagcaggacaaccgtcgttaagccaagccactcagtctgttcacagtcctcggcgatccattttgccaccggctcacatttgaatttgcctttcgcggagcattgcattagaatcctcaccagtatgcactgcaaggccgatatcaccttcttgctcaacccatccggccaggtggatagcaccgcggaaacgccgtgctcgaggcccgaccacgccgacctcgagttgacagggacctcctcgccaccaatgtcgctgttccgcagcttgtcgccggtcgcgagaagccccgactcggctttcacgcaccggcagacgctggtggcaccggacatcgtgccccgcgagaagaaaatgaccgacctccaatgttacggaagcggcacgacgcggctgccgatgatctccatagctgccttgtgcgtcagcagtgactcaagccccagcggcagcgtcgacggcgaagacgctcagtccgaactggcatcaacttttgaatccgagcgcatgccaaaactttgcaagacccacgctcctccgtgccaagtcgagggttgcccgaacctctctgtctcccgagggctatgtgtgcgccacggcggtggctccaagtgcacattccccgggtgcaccaagcgtgccaaactgaaccagcgctgctttcaacacggcggatacaagatgtgcactgaacttggctgtaccaagaaggcgaaacgctatggtcactgctggtcgcacggcggcggccacatttgtgaatcgcccgagtgcaccaaggtgtccacgcaaggaggctattgctgggctcatggtggcggcaaccgctgcaaacacgagggctgcaaccgccgctcctatcggcggtacgactactactgcatgcgccacgccaagaccaagatggtgtaccaagtccgtcaattcggatgagactagatgatagctagactaatttattcaacgcgcactctgcgatgccccgacaatatattagcgccttcgtgcccatcgagttcgtgtgtcctcagggcgtctacttcagcggtgcacacgtacacgatcgtgagcaacgtagacgttgaaggtgctgcttcatttgacatggcagacaaggcaaggcgctgtgcagccatgtacatgctctctttgtcggccgtgtacatgtagcaagtagtaaggcgattggcgagactaaggggccgatatactcacaacaaagctcgtgagtgtgtgttgcatgccagctcaggttggccattaacaaagcgaaagaccgagactctggagcgtaagcgagcggattgcattggtctagcggtcccggttatgtttgatatatccacttcaactttgagcatacaaaaatcaagtggttttgtcagttgatacagctgcgaccttaatctgccgcggagcagctagacacgcagcgcctgcccgagcaatcaaggcgatgccgcgcgttgacgatccacacggttgaacttctgcgctgtcccgtcgcatggctgcttggtgcgtgcggcgtgtttcttgcggcaacttcagttttgcgagacggcgtctatgcggcgccatgccgcacgaagctcgtgtcaagtaaatccgccctggaagcgaaggctccgacaaagacaagctcggcgccgtcgaggtccgcgggccccgaaatacatggcggggtactcgattgctaaaggctcgaggatcttgcgaaatcaacgcaaaatgccctgcgggtcatgtaggttttgccttggcgtgctatcacctaggtagcgaaatgcgtgagtgttgttgttcggtaagacatcgccgacgcttcggatgcccagtctgtccggcgagaaccttgccgccacatgccttcgggcgcttgagttcgacggcactatgcactccacttgtgttgtgtgcaaagtgtccacacggatgagcacgcacccaccaccggactgaatgtcgcatgacggggctcgagtcatgcgaggcccgcgcaggtctttgaccctttgttaggaggcggcaagtcgtgtgccgctccgctttgtctgcttggttttcagttcacaactcaattcaccgtttcgtgagcacatccactcaaccaaagcatgtgcaaggcggacatctccttcctcctcaacccctccgccacggcggaccatgccggcgacagcgtcgaggtggctgttgcgccttcgtctccgtccatgtcgctcttccactgcctgtcctcagtgatgcagagccccgaaccagcctcgccgtcgacgtcgcaccagcgccgcctgatcgcgtcatgcatcgctccgcgtgaaaagaaattcaagagcatgcgttcgtacggggatgacaaggcaaacctccccatgctttcgttggctgctctgtgcgtgtccaatgagccattcgacccgacgcttgagctgtcggcagtcaccgaggctgcatcccgtcctcgcaagagccacactcccccctgccagatcgagggctgcaagaacctctccgtctcccgaggcctctgcgtccgtcatggcggcggctccaagtgcaccgagcctggctgcaacaagcgcgccaagctctatcagcgctgcttccagcacggaggctacaagatgtgcaccgagcccggctgcaccaagaaggccaagcgctacggccactgctggtcgcacggcggcggtcacatctgtgaggctcccgagtgcacgaaggtgtcgacccagggcggattctgctgggcccacggcggcggcaaccgttgcaagcacgagggctgcaatcgtcgctcgtaccagaagtacgactacttctgcctgcgccatgcgcctcgcattttggtttcgacaactacgggagctgctgtgggagctagcttgtagatccaggttggtagaatagattagattagacggtatttattttacacaaattgcgttgcacaaactcttatcgccttccaatttcagttgcgattttgccagcacttcgcctatctacagtacgaagcaatggttttcacaaagaactccacccgagttcttttagaaacgatgaatggtgacattccttgtaaaagaaaaaaatccttggttgtcaagacaacagcacggtatgacaacaaaggcatctagggatctagtggatagcaaatgtagcaatcctaatgattgcttgagcatgttgaaagtaacatggtcggaagcacccccgagcgtgaagcacgcattgatgctcagcaaaatttgaccgtcaaaagcgtagactacaatgccatggtacgccctgaacagtaccaggtacagcaagcgaagctgcgggtccaggtcttgtcactcgtcctacgcgtggcggcgtgagagatacacgcctcccactgtgcccgaaccaagcagaaatctatgcaccaagcagcattaagcgcagattaaggggcacgaatccatgcactttggcctggagaacgattgctaatagcgtctcaaagcatgcttcaaacaggtcgctgcgcgcaacctgtgtgtttatgggcccattgcgccagtcgccgctcgccagcgcaagtgttattaataccgtcgaggcttgaccacgcgaaggcgtgcacaaatgaccgcgttggtcacctccattgggtggccatccctgaacaacccacgaactatgcgaggccctcctgcttccaacgatggctctggatcaaactaccacaccattgttcggtcttgcgccgatatccgatatccacggttttctccatttgttttacgccattcgcaactccccacttgcctttgcagcaacaatcggtctgtctgttctctgctggtcccaaatctgcttgtctagtagccaagaaactgttgtcttgcgctggtgacccgggcttatgtgttcgaacgtgcgagcgccttggagcactatcgaccacagcgccgcgtttgacgtatctcatccgccgttgctaaaccgctcacctttgcagccatccgccagtgcatggtcgaactggtagcaccacacttggctgagcttgcagctttcgcctcgcattcataaatcaattgctcactctctcagtagacacccaccaccaccaatctatctgccgcctcaacatgcgcagcaagtcgaacatcacttatctcctcaatcctgccatccaggccaagacctccacgaaaagctgccagacgccggaccgaacagcacaaagccctgccgacaccgcaaccttggccctctttcgcagtctctcgccagtccaaactgtcacttcttcgttgcggtaccggcagcagctcctggcgaaaatctctccacacgagaaaaagcgcgaccacctccagtacctggacagcaggagagcgagactgccattgatgactctggctgcactttcatcggtcgctagctccccctcaagctccagcaagacaccaagcgtagtttcaagtcccggcgatagcatcgaagcacattcgacaacgcaagcttcttcctcaaccacgaaccaaggcggtaaaactcgtacccgaaagacccatacccgtcaatgccaagtggaagggtgtcagaacctcgccgtatcacgtggctgctgtgtgcgccatggtggtggatcacgttgcacgaagccgggttgcactaagcgcgccaagttgtaccaacggtgcttccaacacggaggtttcaagacatgctcggaacccggctgcaccaagaaggccaagcgctacggccactgctggtcccatggcggtggtcacatctgcgaaattccggaatgcacgaaagtctccacccagggcggactgtgttgggctcacggcggcggcaatcgctgcaaacgtgaggggtgcaaccgtcgatcgtatcaaaagttcgactactactgcgcccgccacgcctcgccaatctcgagtgttgcaagcacggagacgaaccaaagttcttgagttcagcagcagcgcccatgtagagaacccaaaactgttatttaagaacgaaataccaatcgagaacatccatggttcgatactcaccacagcgttggtcgtcgtcaattgtagctagtacggacaggtgcctttgttgtgaccttctgcacgatggcatttgtggcatttgtagagtggccgcttgcgttgctccatggggcgagtccgaacgcggcgcttcctcttcctggcagcgtccacgtcgctacttgacacgctttgtttgttgacaaagcgcgggggtcgtatcgtcgggtcatgctggatgttctcctccacgggaagttccagggctcggttcttaaatgaagatacgtagttgcgcaccaggtagcactcgtcaaagaagttcacggcttggttcattgcacacagcttctgtagcgcagctagcacgtgacgacacgggattccccactgtaatcgtctcgaacatgtgcacgtgcggtgctccaaatccacacgcctctgtcggatctttgcgttgtgcgaattccaaacgaaggcgagttgggctgtgctcatgcaaaccgagtagagcgggacacggtcaagttgctctttcatcagttgatccgccgctggtgtgaccacgcggcgctccaactcccattgtgtcgcgcgctcgtgcctttggaaggcagcgtgcatcgcaacaagcgataacactttgatgcattcgtaagggagctgtttcctcaccggcgcaaggcccagtgtctccgtgccgagatccaactcctcaaaccgcgtagtctgccacccgtacatctgtcgaatggccaagtacggatacaagcaccatttcaacggctccactccacgaatgtactgagccgccgcttcattttggcgcgaaagctgtgccacagacgcgagatactcgctctcggcttccgcgcgctgagcttgccacacaagttcctcgtcctcttcctctagttcgatgcagtgtgtttcacgcatgtcgtccagcaggtgctgagtacacatcattacatggggaacgagcaattcagcgcatgccgctcctaaggccccgcgcccgttaaccaccaccgggaacctccgcagcgggaacccgtgcgcgatcaatttctccaagaaccacgtacagtgcgtcatagactcctcaggcacaagcgcgactgcatgcatcatcggctgcaggtttccatctcgacccaccagcaccaacatggtgccgttgtagctcgcgtgctgcatctccacactatcaatgcccagcacgctctggtcgttccacacgccggtcgggtccagcgccagcaacgctctcaggaagcacgaccccgtggccgatccctctccagaatgacctcctccagtctggccagcctccgtctcgataacagtcgccacgtgagcgttcagcgcctgcagttgctccaagtacccaggcagcttctgcatggactcgaccacctccggaacggcgtctccgttgcgccgcgcggtctccaaggcctccagcaggtcgctcttggccttgtacaccatgctcttgctgcactggaacgactcggccgctgccagctgcgccaccagctcggccgacgacacgcgcgcgtccgcgtacacggcgtcgcgcagcagcgcgctctccttgagctgccgggtcgtgggcttggccacgctgttgcactgcggactgtgcgccagcgagcccgacgtcacgtaccagaagcgctcggcgccgccattatctgccgctgccaccgccttcttgggccgcgagcacacggcgttgacgagccacggacacggcgcctcgctggagcacacgaacttcttgtagctgccgccgctcacctgcacgaccgcgcgcttgcccgcgcgcagagccacgtccttgatgtgcgccgtcaggtccttgccctgcgtccaccgctgggtcttgagcgccgccagctgcgcgtctacgttgctatcggcggcggcgtctgcgggcggcggctccagcaagacgacggcgggctccggtggcggcgctggcagcatttgaaggacgcagttcaggaatgaatgtcacatctgaaaaaaactcacttggtttttgtataggaggagcacccctacgcagttcatcaatgctccaacagctgaaggagacttcacatgtccattgaagcagacctgtctcgagtcgagcttcaattgactcaggagttgagtaaatgcgggctatcgatgtcacgacttgccacggagaccacattccatgcactgtcgccaattgatgcacagtgctggaatttccagctcggtttccagtgggaatccatggttcaatgccgtctacagagacgtcgattgcttatagaccgtgtttacatttaagttcgggatatacacgttgttctctctctctcctaacactagggaggggccgacgagtcgcgtctgttggtttacgcgtcatcggtgtcgtcgtcctcctcgtcgccgagcgagccgagcttgctgttgtacgggttcgggtacgggcagagcagcttcgggtcgtcgtagtccacgtcggcgctcatgtccttggagtcgtcgctgcagatgccgtacgtgtagttgaggcgcacgcagacgccgttggcgcacgggtacacggacggatccacgcagttgttgaaggcgcactgctggccgatgggcgtcacgtagaacttgtgctcggtcaggtgcatccggaggtgcacctcctgctcagcgagtacgagcgcggcggcggcggtggcggcggcaacggcgagggtgggcaggagctgcatcgtcgaggaaggagggacttgagctggagcgcgcggattcaggaatggatggcgatcttcgatctgccggggacgctttgaacttctgatttatgttttagctgctctgattggctgagaacgagatggctacagcgatcatcgggattccgtaggtaacgttgcagcgctcgatcaatctgcaccacgttggtggcgcacttttttttcatgagaattacagtactagtaactaagcttgtcacgaaacggcttcacttatttttcaccttgttcttgttaacagtggcgctggcccacaagaccagagtccagtgctaacacggctgaaacagtcacttgtttgaatatttttcctaccaagacgaagtgaacgtcatgatcgatcactgcagcttacacgtgcacttcgtcgtcctcgagggcgtactcctccatgccctcttcctcctggtccagcagacggtatcgccgtttggcctcctggtgtgccaagcacgacgcgaaaggccgactcacgcagctgaaggtgtagccggccaaggagccgatctgcgtgtacagcttggtcacgcgattgcctgtctgcaactgccatgccgtgatctcgtctttgagactttgtgcacgatcgttctcgccagctgctcgtgcgaccggatcagcgaccgtaattccactgctaagcgactccggacccttcttctccttctggaatgcagacggcagatcaatcgttgacggacgcaacaggtgcgaaccgaacagctttgatgcgcggccactgaataccactcgtgacggagaccgcgagccgtccttttcagccttgagagggttgtcaatccgtgtcaactcgcggtggaccggcttgagaacagtttcgtttgaattggatttcggatcgcacatcggtaggtagaccacgtttagattctgctccgcatcggagaggggccactggtgcttgatacgcattgcaggatccaactcggtcgccaaaacttgcaaccacatgcgtccctgcttggcattgtacacggtgccgatggccgacaaaatggcaccgttcttgacgtagaacagctctttagctgtgttggatgcttcagcacgggcagctatcgagttatctggcgcgatgctcattgcagcttcttcctcctggttgctgctttttgtgtgcgactcgtccgacgagaggaacacctggtagtactgcttcgggttcattttcccaggcgccgggatttcctggaccatgcatgtgttggtcttggcattcgattggatcgcgtagccgtaccggacaggttgaccgaggtcctcaaagtcctcctcctcctccttcgattcgtctgcattgttatctgggctgccattgccagcattgttgtcttcaccgccatcgtccttcgcatccttgctaatgttggccggtttttccgaaggcaatgctacccgaatccacatgtgccccctgtcgttgagcacgcgctgagtagaggagaacacagatcccggctcaaggtgaccaacaatctctgcctgcaggtcagccgtacgtcgcaacggaagtggtcgacgactgtacactgtgcgatagaatcgctcagcgttgtcgttagctggcacatcttgaatgcggttgctgccccagggcaccattacccgctgagctgtgtttgcgttgcgttcaatgatccacgcatctggtcctgccgtctccaccactccttcctcttcctgattctcaaccacatcaagcgtggggtggtcttcttcggtcttcttttcaccggcttgctgcagctcctgctgcgacttcagcggttggatgcgcacccagacgcggtccttcagcagcttgcgctcaatagcgcgcaccactcgatagctctccacgttatacaaccttggtgcctgcagactcgggatcgctcgaaccggcagctcgcccgcccacttgcctcctcgccccgccacgttttgcagatacactggtccattcctgaaataccccagttctttcgggtcctcgacctcaatcagcgtcttgtggaacgacgcattgatccatccgccgagccccgcgaacgcggacgtcaccttcaccgccaactgcgtgaagtcctggttgaacctgcactcagtggcttggaacacgctcacaggcggcaggaagcgctgcatgtggcgcggcatcgacttcccggggccagcggacgacgaggacgacaccgacgccgagtgcagattgaacacgggctcgcggtacagctccagccggtcgcgcgcgcacatgtacgtcggaaactctgctcagcaccaccacagcatagtaaaatcaaatcagttttctctgctacagccagttatcgcgctgaatcaccgcgtaccgggcagtctgcgcatgtatcggaactgcgccgggtgcgccgcgaccgccgagggctgctgacgcggcgggaggtcgctgccgtccaccggtgcggatccagtggggaactcgagctgcgcgcggatgtagccattgttcttggcgttggagaagtagccgcggcggatcttgagccacacctggtcctcgtagtacagcacggccgagcacgcgaagtacgagcccacgcgcagctccccgcagcggtccagcaggcgctcgcgcggcgtcgagtacacgaacaggcgctcgcgggtcagcagcgccgaggaggacgccgcgccgccgtcccggccgatgtactggaagaactcctccatgctgatggcgccacgattgacgcactttgactactggagaaagaaaggcagagtcgggcgcacaaatggaagaggatggcaatttcggcctatcatgtttgaggaagagttgtcagatctgagttgagtcgaattttgagccaattagaaagtggtagagtagcctatcaaattggacgatttacacacgtggtttttctaccaatcggatcgttttatcttacatgttgaagcggtctcgttgctgcttcttggtagcaatgcacttgtgtgtcttcatcgaaggcaagacgagtgtggtttgtacaaatataccatgcttcgtgcattgtcaagtgaggtgctgctctgatgcgattgtcggcagcttgggaggacgcttactggccctcgcagaaggtcttggcgttctggaagatctgcatccaggggctcacggggtgcgcctcgaactccgcgggcatgtacggccactggtacttgaggaagcagcgctccgggtgcggcatgaggcacatgtggcggccgtcgctggacacgaggccggcgataccctcgggcgagccgttcgggttgaatgggtactccgtcgtcggcacgttcgagtcgtccacgtagcggatggccgccgcgccgctcgacacgtacttctcctggatcttggggtgcgtgaagtgcgcgcggccctcaccgtgcgagacccacacgcccagggacgagccggccatgccgcgcagcatgatcgagttcgactcctggatctgcaccgacacgaaacgggactcgtggcggcccgactcgttgtgcacgaaacgcggctgcgccgacgtcttggtctcctcctcgatggccttggcctccgggtggtctagccatccgagcagcgtcatgaactggcaaccgttgcaagcgccgaaactgaacgtgtcctcgcgggccttgaaagccgcgaactgcttgagcacgtcgccgtggaacttcaccacgcccgaccagcccttggccgagcccagcacgtcagcgaacgtgaagccgccgacgaaagccacaccgcggaagcgctcgtccaggaccacgcgcttgttgacaaggtccgacatggtgatgtcccacacctcgaagccggcgtggtggaaagcggcaagcatctcgcgctcgccgttgctgccctcctcacgcaaaaccgcaacacggtgctgagcacgagtgctcagctggcgctccggcgtaggcttgggctcgtacgtaaccttccactgaggagccgtgcgggtgcgcagcgagcgctgctcctgggcaacgcactcggggttgcactgacgcttctcaagctcgaagctcgtagcctcccacacgtcacgcaggtcgaccatctggtcctctaggacgctctcgccgttgacgctcaccttgatggcgccgtcggtcgtcaccttacccagcttcacaagcggcacgttcgccttgctgaagatagcctccacctcggtggcatgctggccagcggccacctggaacacgaagcctagctcctcggcgaacagcacctggataatgtccttggtcgtcgccttgccgcccgcgaacggaatgtccacgtcgaggccgcagttgccggcgaaggccatctcgagcagcgtaacaataagaccaccgtcgctacggtcgtgaccagcgagcaggtggccgttcttgatgccagtctggatggcgttgaaggcgttcttgaacagctccgcgtcctccacatccggggacacgttgccaacctggccgtacacctgagccagagccgaaccaccaagacggttcgcacccttgcccacgtccacgtagtacagcaggctgtcgcgagcgtgggtcttgaggtcgggcgtcaccttcagctcgacgtcctccgtaggcgcgtacatggtgatcacaagcgtgccgggggtcttcacgtccttcttgttgaccttggcagccatggacagcgagtccttgccaccgtcaacggccacacccacctgcttcataaaagtggtcatcgcctcgcagcactcgtacatacgcgcagcctcgttgggcagcttagcggcccacatccagttggcagagcacttgcagtcgtcaagaccgcggccgccgagagccgcccacaccatgttggtcagcgactcaccaacgctcaggcgggccatggcacccgggttcaccagacccttcacgggctgctcaccacaagcgctcaccacacccgtgaacttgccgtccttgttggggatgttcgactgcgccacgacggcgcagtcagcaagcgtcagctgcagcgggccaacagtctgctgctgggcaatcaggccgctcaccgagcggtcaaccttgctggtcaggaaacgcttggagccgaccgacagaagacgaagcacacggtccagcgcatcgcgcagggtaatgtcagcagggagcgacagctccgagacggtctccgtggccttcacatccgtgaaggtcttctgcggcatcttgcccagaacaaggtcaaggtcaaggtcgaacggcgtcgagtcgtcctgcgagtcgtgcagcacgacatggccatcgccggtgacctggcccagaagagcgtacgggcagttctcgcgcttgcagatcttgtcgaacagctcgacgtgctcagggcgaagcagaagggcgtcgttttcctggtactcagcgccccagatctcgagcacggacagagtgtcgtcaccaaccagaatgttgcgcacctcgtagcgagcgccaccgcggttagcgtcacccggcttggagttcgacacctcaacgatctccttcagcacgttaccgttgccaccagcgccttggtcgtggatcgagacgatggggttcttctcgccgaggtcgcagcaagcgcggatgaccttgttcagcttgcactccatctcggcatcaccacgctgaacggcgttgaagtccaggtcagcagtcttagtgtcctggatacggctagaggcggcaccaccgcccataccgatacggtagcacgggccaccgatcttcacgacccacatcgagatctcgggctcgcccttggtgcagtggcggccgtccagctggccgagaccagccgagaacatgatcggcttaatgtactcacggcgctcaccgttgggcagcaccatgccgaacgaacgggcgaaacccgtaacgacgggctcaccgaacttgttgccatagtccgaggcgccgttcgaggcctggatcagaatgtcacgggggtgggcaaggttcgaagggtactcgagcttctcgtcctcccacggaagcttgtatccctcgaggttcaggttgcccaccgagtaggcgctgacaccagcaacgacgttggcaccacgaccggtagcctggacatcacggatacggccacccgtgccggtctcagcaccagggaacggcgccacgcccgacgggaagttgtgggtctcagcggttagcagcaggtggctgtcaagggtgcgctcctgcacggccgagggctcaccggggttcacggggccgagcgtgacaatgttggcgccctggatgacggacgagttatcgtggaaggcgatgacactgttcttcttggcgttctcggtgagcgtgtccttgaccatcttgaagagcgtcgtgggcatctccttgccgtcgatgacgatcttgccgccgaagaaccagtggcgcgagtgctccgagttactctgacccatgtcaaagcactcgacgtccgtggggttgcgacgcagcttctccttgaacaggttcaggtagtactgcaggtcccagtcgtcgaagccgaggccgatctcctcgttgatctccttgagcgcgtcgatgccgcgctccatgatggggatcttgcgcacgagctgcaccgtcttgccgtgccagaagctggccagcggcttgtcgtacacctgctgcgtcatgcggtcgcactcgtggcggagcagcgcctgcttgagcgtgttcagggcctcgggcgtggtggccgtgtagcgcaccaggtagcgcgtggcgcgctcaatgcgcttgatggcggagatgccgcaggcctggcagatggccacggcgttgctggaccaggccgtggagaagttcatgcgcgggccgacctccacgagccactccttgctctgctcggcggcggccaggaacggctcgtccgcgcgcgtctgctgcggctcgaaggtctcgctgagcagccagtggagcgtgtcctggtcggcggtggacagcgggccggacccggccgtggtctccacgtagaagcagtactcggtcacgagctcgtccacctgcaggccggcgtcggcgcccacctgcgcgcgcaggtaggccagcagcgtgcggttggcgtgcgccgtgaaggccggcgtgcggtagaagcgcagcagcgcgctggcgtgcgcgctggcggcggccgtcttctgcttcttctcgggcgacgaggccatggtcggaggaggttgaagctcggggaggagctggcggagggtggggcggacactgcaaaagcggttgtgtctgcgtgttgggccgtgcctcttgcctcgcccctggggccagtggttagatatggatacaagcagaacgcattctgattggctgaaatgagattttggaccaatcacacgcgactaaggaccgaagccctacatagaccctgacaccgcggagcaatgcttggacagcagagcctcccatcgcgcggattaacgatttgcaccggaagcgcgcgcgcgaaagctaccgcggccagcatcccagcatttgtgaccaagacgaccagcggtcggccaaccgtcggtcgtctagaagtaaaaattattgaaggaatcgagctgcaagttcctaggtttaattgatctggtgacccggacatcctgcgcatccgcgtgtgccacatccgcatcggcggacaagctccttcccatactccgacacggtaaaacgagtggccagcccaaggtcgctgctgacgtacctatggtacagtgtaccttcgtcatttctaccaatccattctctgtaattctacccaatcacaaaatatacctttttctatccaatcgcacccatcaaaagttcgagccaatcctgtcgctgcacggtctccgccgcacaaaaggcaacaccaagatgctgcaacgtggggtggtgcgtctcggacgcggcgtgcgcgcgtccgcggccctctcgcgtccttcggcgtccaagaacttcgcatctaccagcgcgcgcttcagctcgtcgcgcctgcggtcggtggcccccattgcttcctctccgctgctgcagcgcgctggtctcgtggccgccgccagcaccagcgccgcctgcgccttctgctctgcgcccgccgtggatgccgcggccgtagcgaaagagggcggcaatgctctgcccaacgtcgttctctaccagtacgagccgtgcccgtactgctgcaaggtgaaggccgtgctggactacctgaatatcccgtatgaggtggtggaagtgaaccccctcaccaagaaggagaccaaggccttcacggactaccgcaaggtgccggtggtccgcatcgacgacgaggttgtggtggactcctccgctatcatctcgcgtctgcgtgagcttgtccctacccccgagggctcgcaccagcaagatgaggacgccctcgaggaggaggagaagtggcgccaatgggtcgacaagaagctcatcctcctgacgccgcctaacatttaccgcactgtaccggaggcgctgcaggcgtttgactactgtctgacggagggcaagttcacgcccatggagcgccgcatgtccaagtacgccggtgctgtgatcatgtacctgatcgccaagcgctccaagaagaaatacggcattgacgacgagcgccaagcgctgtactcggcgctggatagctgggtggacgctatcggcgacaagcgcgcgttccttggaggtgacgagcccaacatggctgacctgtcggtcttcggcgtgctccgcgccatgcacggactggacacgtacaacgacatgatgcgtgaaacgaacatcgagccttggttcacgcgcatgactgctaaggtcggccccagctcgcgcacggctagcaactagacaatactgcttcagcgcagcaaaaagacgggtagcatcaagctaaacaaacgttcaattatcgtacgctcgcatttctatataaaagccacttggtggcctagttggtggcatcgcccttcttctgaatgcggtggtaagccacacccgtgccagaaatgttgtctccgagtccagcagtgtggtcgggtttcttgcaggccatcatcggtacgagatggcactggaagttggcctcctgccacgtgacgacgggcgagaacggatccagatccaccttgaggccctgactcttgctcagaagctgctgacgagccagcagcacttcaatgcgctccgggtccacttccatttcagcgctggtgcgcatgggcttaggcttatcgtcgtcagcagcagtctcactgccgggggccggcctcttgccgcatgcaaccttggagctcatgagagcgctctgcaccaacgccgtcgtcggatcctcccacatgcttccttccctctggcacacaatgtggaactgcagcgtgtggaagtggatgcgggaaagctgcgcaagggcgtagctgtcctggttgtcactgtcctcgctgttgtcctggccagaagtctgaaagctcttcttagctttggacgcgaactggatgacgtcgtgcagctgagcgctaatctccgccaccgtaggacgcgacgtcgtagccgtgccctcttcacctgtgacgaggtagtggtgcaggataaagagctcctgctcgttcagtccgatggagtccacccagggcagcacgagtcgaaccgtgtcatcgaagagactgaagtccgacacagccgcaaactcatagtgggtgggcgtcttggctacgaagaggttctgaagtacctccgagagagccttgagacgcatcaggcgtccgcgctcgtccgtctccacctccatcagctgcagtcctccgaacacgaccaggtcgggcttgaacgcgtcgagagactgctcgaactcctccagcaccgacagccgcgcgttgtgcacgtcgtggttcaggtagtatctgttcgcgcggggcgagacgtgtcccctgaactcgtctccgctcgagtactcgagcaccaggtgcacgtcttcgtgctggtgctcctccaagtggcccaccagttggatgcgcgggtccctgaagtacggcttcatctccttgcccatagccgctcccagcagcacaacgcatccctccgccgacgcgcgctcggccatcgtagcggcgttgccgcccaccttcctcttgacgcccggcagcgcgtcagccagagccaccacctctcggaactgctcgggggacagcatgctctgctccgcggcagcccccgaggagaagtagtaggcaaagctctcctgcagctccttgagcgagccgatgcgctcgtggtggcgcttagccaggctgtccgagaacttgccggccttgttgaagccggccttgctcttcttcttcttcttctggtggtgctggcgctccacctcccgcacgctctccatgagctccacggcgggaacggccacgtccaggtcggcgctgcagcagaaggcgaggcgcggcggcgcgcgcgcgtccgcggcgttggcgtcggctccgttggcggcggcgtcgccgttcttggacgcgtggaagacgagcgacgccagcatctgctgctgctccgccacgctcagcgaggcctcgcgcgcggggaagagctcggcgaacaggtcgccgtacagcacggcggccgcgcagacggccagggacacgcccagcgccaggagctgcgaggcgctgtacatggcggcggagggggcgaggtccagataaagtggggcgattggggtggtacgtaaagttgtggggcgaagtgatcccacgcagatactttgacttagatcgggcgaggattttagccaatgcgaaaaatagtttcatttcaaccaatcaaattgcgtgactggtgttcatcgcaatttcggtgatcgatgaacatgggtacaattgtgacaagccaccaagatttcctcagttcgagacttgacttgcggcgcagctgtgaccatggtcttctcaacgccaacgcgcgcgttgttactgttgctgtcggcggtagcgaccgcgactgtttctggcgggttggttctgtcgacgctgcccttggccaagcctgcggcgacgtgtgacgcagccttctcgtccgagctatctacggcccgtagactacgggcactgacaagattggcggcaacgccacctctctgggctcgcacaactcggagaccagccatgaagctgctgccaatattattggaggtggtgcttcaaccactaatccggctcgaggggcgcccgcgtgctccaagacgcagccgccggaggtttgggtgttgttcagccagcagtgaactgcgagtcactgctcggtgtcgacctctcacacatcgcggaggatggcagcgtcaccatcacatccgcggctgagacgacccacgagggtattttgtactgcttagtggaaggtgcgctgccgtcgtcgacaaactggcaggtcatgctgcccgttcgcacgtggacgcaacgctacatgcaaatcgggtgtggagggctctgcgcgatgatccggatgcaagtgaacgcggcctctggttcgcagcaggtgaaagggggcgagtttgtgctggctgcgaccgacatgagcggctccatggatggcaaggcgttcgcgaacaacccggggcgccggaaatcgttcgcgcacagtgctcagcatctgacggcactagtgagcaagacgttgatccaagcgtactacgcgcagaaggcgagatactcctacttcaacggatgctccgatggcgggcatgagggggttatggaggcgatacgctacccggatgactttgacggtatcctggcgggagcgcctgccatgctgttccagttccagaacagtctccaccacggctggctggctatgagcaatatcgacgggccgatgcctgagctgctgccgatgatgcggggcccgccaccaggccctgaaggccgcggccctcccggccgtggtcatgccctcccggtcgaggccctcccggacatggttctactggcggcggtcctacagccattgtgacagcctccaagttgccgctgctgcacgctgcagtccttcgagcctgcgatgcgcaggacggccttgtcgacggtctgctctcggagcctagactctgccatttcgacccccatgagcttttgtgtcctgcagaaatcgctgcgagtgatgaagatcgacagtgcttgacagaagcagaagtgaacactatcctcaagttttaccatggaccgatcgacccagttaccggacgacatctgaccgtcggacagtctcagtatggctctgagctggcgtgggcaggcgtgttcgtgcctcgaggacagaatgaaccggtcatgagcgcccacatcgcccttgctgcactgcggtatctgatctttgagcccaatccgccggagacatactcgctcaacgaccttcaattcaccgaagcaactgtggagaaactacgcccccgtcacccactgctggatgctacgaacccggatttggctgcatttaagtctgcagggggcaagttgatcctgtggcatgggtggtctgacgagcacatttcgccccgcactaccatcgcataccacgaagctctcgagaagcaaatgggcggcgcagaaaatgtggcagaattcgagcgactctatctgttcccgggcgtgcagcattgcggtcgtggcgagggcatggctgcgttcgatctggtgaccccgttgctggagtgggtcgagcgaggaagtgcaccccacgccattctcacgagcacggagcgagacctgccgccttggatgccagcggcattggtggttacgcgcagtcgccccgtatttccgtacccttcgttggccaagtacacaggccggggagacgcaaacgacgccgcaaacttcgtcgagggagctccacttttcacggacaagacggctgagtgggccggacagagttttttcgagccgtatgcgccccggactgagtaaatgacaacaggaaaccccgtgttgagctttcaacttcatcaaccggttcatcagccaaccgtgccgaccgtgtcaactacctacttgccttttgatgggggaaacgtcaacgtttgttaccaaggcatcttagactcaacaaaagtgcccgcattacggcgaccaagataggatcaaggttcaattgcacttccacctttgcggtggttatcgtgacaactcgcatcgacgactgcgatagtggttgatgcgatgtggaggcttgaatatgcaagatctcgcgtcgctgcgatccagcgccgggaagcgcaatctatcagtacatgtacgtacagctagcgaatatttcacagcgtagctatgagatgtggggcatacaaccactcactggatgaatcggtttgattcatccttgctgtcccatgttcgttgccaaccaaccactatcttactgcagtccggaaataagtcgctatgagctcaggagcaacaccaaggcctcttgtccacactcctgcattcaaccgcccaagatgaagctcactgctctctccatcgtctgctttcttcacgcggtagctgccaaatccgcgcctccttgcggtctgccctgctccgagcctagagagtactgcgacagctccatcggcgagtgtcgagccgctgccgccgacagcaccgagtgctataacgccacgacgtcgctgttccaggacggctgcgacccgggcttcaagtgcctcaacagcctctgccggtctgccttcgagtcggaggccgcggatggccggacctgctccatcatctgcgcggccggcaagttctgcgagaacggcaccacggagtgccgcggccccgcagacgacagccagtgcttcaacatgtccacgggattcttccaggacgggtgcgccgacgggttctactgctcgttcaacaagtgcgtggacgtgagcgtgtaggacagagtagcaatgttagacatcccagtcgaagaccgagacaaccagtagctgcacaaatgcagcactacacctaagcttatcaatgcagtatcgataacatcatccaacacatcggtgtagtcttcaacggcgggatatttcagctgaaggtacacatgattcatggccatttctcattgttggcaggtgcgtatcatgaacggacccaccgagaagtcgctaggacccggtggccggggggggggtgtccagccaaaggagatccttcttaccctcatttgtgaatctgcgtcctcctccgcaagtccttccaagctgattaagatgaagatcttcgctctggtgctagccgccgtcgctgccaagtcgtgtgtggcatcagaggccaactcgacctctgcttcctacgacaagtccggctccggggctgtttgcttgacggaagggtgcaacggcgtccgggagtactgcgacagctccatcggcgagtgccgagctgccagcgacgacgtcgagtgctacaacgccaccatcgcgctgttccaagacgggtgcgacgcgggctacgagtgcatcgacgacctgtgccgcgtgtcggcggaccccgtcgacggccgaacgtgccacatcatctgctcggctggcaaattctgcgagaacgacacgaccgagtgccgcgaaccggcctacgacggcgagtgcttcaacctggccaccggcctcttccaggacggctgtgacgagggattctactgctcgtacaacaagtgcgtcgacgtcagcctcgatgactaaggggcccactccctacttcgactctgtacatataaccgtgctcaatgagcatgctcactaatacatccatcacttgaccattcgtgatcatctcttgatcgtcctacttttcacgatgataattttgaatgccgactctgcttcctcgtttgtactaagggtatcatgctcttagacctggaagagacttttgcaccgatgtgagcaggtttacagcaccggaattttccttgtgcgtatcaactcgaaatagcggtaaggtgtgttgcgtctgcagtggtggccatgggacgaagctagggccatttgtagagcttggtggagcttttggatactcggtggtgtgctctttgaagcccgggatgatgcagaagcttgtccttgtcgtctccattcataacatcacggggatatcgaggctttcagtctgaaagtttcagacaaactctcactttcgaattcacttcctcatcaagaccccgcctcaagtgttccaaccacaagtgtcatgaaggtttccatcctgctttcggccattctcgtgacgaagttgtatctggtcgcggcacaaactgtcaataactcaacttcaacgccaagttcctgctacgagacctgcgaagacttcgaccagtactgcgaggtcagcaccggagtgtgccgcggcccccgctacgacggcgagtgctttaacccagccacaggcgcgttccaggatggctgcgatccaggatttgcgtgcgtcgacaacaagtgcgacttcctggaggagatagcagaggcgacggaggcggactccagctcggcgtctggatgcagtgaagacgctcagtgcagcgtcttcggcgagtactgcgacagcgacctcaacgagtgccgcgcgcctatcgacggcgaatgctacgacgccgcctccggtgtgtttacagacgggtgtgccgagggctacgagtgtctcgacggtttgtgccaggtgcacaccacaactacggacgattcagtgtgctacctcacctgctccgctggagagtactgcgagaacggcgccaatgaatgcagatcccccgggtacgacggcgagtgcttcaaccctgctacaggccactaccaaaacggctgcgacccaggcttcacgtgctccaacaaccagtgctcgtacgcttgaccagcaacaaattatctgcatttgataccccacactcgaaagtccgagccattaatcccaaccaattcaaacatgacaactaccgggaaactcgtgatagcgtcttcctcagtacttctccttcatctcatgtagtagatgtcagttcacacctcgttcacggtcggcaggtccttcttgtcgacgatgcgcgcgaacgggaagggccccacgaactcgtactggttctgcttgcgtgtcgacttctccacgtcgctgtagtccaggccggggaactgcgccttgttggccgcgaacgactgcgcgtgccactcgatgtcgaagtcgttgacgtagaagttgccgaactgcgtcttgtagcgctgctgcacctcgtacgggtagaagtagaagccgcacacgtccgggtcgttctcgcgcacctcctccggcacgggcgacagcacgtacgcgatcttctgcgccagcatcggcggcagacacagctccgtcgagttgcgcgtcatggcgtcgtactcgaacagacacatacgcagcatgcggtccccccactgcgtcgtgttgcgcacgaagtacgtgtagtcgtcgctcacgacgcagaagctcgggtccgtgcagcgcaagtgcagcggctgcaggttcactctcgcgtagagctgcgtctcctccgacagacacgactccacgccgcctccgatggtgctggatcgccgaatgggcaacgggatgttcatgccggggtcgccattgccgtggcgcctcgcgtcgatcacctcggccgtgttgccgcactggtaccagttctcggggtcgtagctgttggggcacatgctggcctcctcccactcggtgatctcctgcagccagtacttgagactgtggctgcctcgcgcgtgcgtggggccgagcgcggggtgaatgccgtcgaaccacgagttcttgaggatgaagccgccagtgaagccctgcttggtgcggaacaggtcgttgtagcccacgagcgtcattgcgtggccaccttcaggcgtcatcacgtggctagtgatgaactcgctgttcatgttgtagttctccccaccgttgatggggacgcagcacgtggtcatggccagctcaggaggacaaagcgtgcattccgttgacgccgggttgcatcgctcttcgcctgcaagctggccaatgcaggggtagtagtgggtaatgtacggcatggcggtggagattgccattgctcgcttctctttggcgagcgcgtgcttgacggagacagcgtcgtagtatgtgtccatcttcttgatggtgaggctcaacgggttcgttttcctcgactctatggtcaatccagggcacaccgagtcgttgcctgggtctgggatgtagggacagatcgagtccgggaagatgctgtccttgagcccattcataaggtacatgagctccgagacgtctccaccgtcggtcgagttcttccagatctcattgcccgggatcaagcacgccacttgctgcggcgatccgggcggacccgcacacaggcgtatcacctccgcgccgtacgcttgctccgacagcgccaagaactcgtctggctgcagccacccgcgcgcgattccttgctggcggtagctgttctccagcaccgcgaccgtggcgaagtcccagcacgtgccgcgttcgtcctgcgtcttaagcggggtgacaaagtcgaccgcgaacttggacgggaacttgcagtccctgtggaattccgtctcaccgcgcggcgtcttcgcgctctgcgccatcaccgcagcgtgcatcgcctccctgcattcaccagatcaccaaggtcagaacccaaccggtcaacgaatgccccctaacaatgcaactccttctctcacatttgctgctgcatccgagtaataatttcttgctgggcagctagagagctgtgcatcgtggcagcgtagcccagtccggcgacgcccagcgcggcaccaagcgccagcgccccccacgaccccaattttcggctacgaacagccacttgagtggaacgaggagggccgagcgcctcgcattcttccgcgacttgcagcgctccgtagcccccagccatgatggaattaattggacaattgcactgcaacgaaggactcggactgctacagagctggatgattcggatgtgacttgcacatcaaaggacgcgacccatccccatcatccttttcatccaatcaacttttttcactactttcattggttgaaactgttgcgacgtctcattggtgcaaagtccgattacgtatccaacgtcattcgcagagcggaaggatcgagaagacgtctccacccgcgctcttcgccgccgccgcgcgccacttccaggcctgctcctgcgtccacacttgcattgccataatccccatcgcttcctctctccgcgcgtgtaaatttcaccccagaactccctctaaccgctccataaagccatgttcgacggcagcttcaagtcgacgcgcaaagtcaacctcagcggccgcaagaagcccacgacgggctacagcgcgcgcctggcgtcgctctcaggcccccgaagccgcgcggacgtggcggcaccatccgcgggcgttgcgcccggctccaagcaggagctgatgctgcagaaccgcctggccagggaagaacgccacgcgctcaagcggcgaacggccgcgtgcaccgctatccaggcccagtaccggcgcgtgagggccgcggagcaggcgcgcgcttccgtgttctccgcgctggagcagcagctcgcgcaggtcgttcttacgggggacttccagagccgcgcgcagcccacgccgcggctgcagctcttcgtgcgcgagttcctcttctccaggacgagcgcagtgggcgcagacaggatacgcaaagtgcaggactacctggtgttcatgctgctggtgagcagcctgaagggcagcgggcaggacgggaccaatgtgttggaggcccggccggacgccgcctgggtgttccaggtcacgcgcataagcgagatcgcgctgcgcacgctcgtgcacgaagagctgaagacgtcggcgcagaacgccgcagtggccgtgaacccgtacttgctgctgctggtcgcgttcacgaacgcagactcgttcaagactgcggagggccaggcggcgctgtctaatgtgttgtatcaccttggagtgacggtgcaatacggcgtctttgacgcgttgagcgcgtgcatcgcgctgcaggttaaagaggggaaatcgcgagagaacgatcgactcgtggacgtgattgcaggcgtggcggctcaagcgcttcggctggtggttcaaggcccgcaggagcgagctgataaggttttgcagcgttttgcttccaagattttgctatcgccgctgtctgcaagctcgtcactgacgagttatgttgtgagtacggcgctatctactgatgggctctccactccagaacagaccaggaaactaggacgcttttgggcgtcggtggtacagcatctgcccacaaagagtgaaggtggacaagaactttcgtggcagcagggagctgtcgccgtggggaacgttgtggacttaacgtcctcgtgttcgtttgacgaagctctcgtacgggccatcccgtcggctctttcagagatggtgacgtcgtcgttggtgcagtgggcgttcgatgtgaagcacacccaggtagaccccatggccctagaagaagactacgacatggatgatgatgctgaagtacccatcgtgcctcctacgtacctgtccgtaggaagcgctgcttcggacgaagaagttcgccgcggtgcactggctctgggcgatgccgagactaaagtgcgcgcgcagtggaagaacctgtgccactcgagtttcagcgctcggtgccttgacgtgctgctgcatacgagtgacgcacccgtggaaccaaccccgcccggtggaaatacagtctcccgattctgccgtgtcctaaccactgtactcctatcgacaggcaggtcttacgtgctcagcttggctataaagttcgcgaatccacctccaactctttttgctctcctgagtgcaatggccgtggatcagttcgcaggcggcactgccgtctctgctaacagctcaagcttgatcaacagcatgtggcagtggataaagccgaggatcaagagtatcgctgctgaacactctgcgggctcgctcgctaatggtcctctgagattcacgacgtcgcagttacaagtgctgctggtcttcaacgtcgtgtacagccacatgctgctgggtctcgacgacgaggcattctacgacggccagtggccgctcagtttggctgaagtggaggctttggtaacgtttttgaagcagtttatctacgatttatgctggacaatcaccagcaacaatacgctctccgtcgacaacatggacgagaacgagctggtgctgttctcggcagttgtctcctctgtcaagttgttcaaccagctctatgatcgggattgccgacgtcagttcatgcctggcggtgcgtggctgtggcctgcgatgcctgtcgtcaaggagatcgtggaccttgagctgatgaaggagggcggcaaccacgacgcgcacgcgatctacatgctgatgaacgggaaggcggcgtccccgtacgcccgcgccgcgctgatattggtcacgatcccgcaagttttgtcgttcaacgaccgcgtccagctcttccagaagttgctcgaagacgggaaggctcagctgggaaacatccgtgacgagttctcgcgagctctgcaggtgcgcgtgaagcgcgacgagattgtcgttgacagctttgatttcttccagaaagtgtgcgacaccatgtcccccgcggccctcaagtcccgcgtcaaggttacgttcgttaacgagcaaggtctagaggaggcgggcatcgacggtggaggcgtgttcaaggagtacatggacaacctgacgaagaacgccttctcgccagagtacggcttcttcctggccacggacgagcagcttctgtacccgaatccaggcgcgcgatacatcgtggacacgcggaaggaggcgctcgaccgctaccgcttcctggggcgcgtgctggccaaggctgtgtacgagaacatcttggtggagccgcagttcgcggcgttcttcctcaacaagttgctgggcaagttcaactacatcgacgacctgcactcgctggacccggagctgtacaagtcgctcatgcgcctcaagcactacgacggcaacgtggaggacctggcgctgaccttcagcgtgagcgagatggagttcggccaagtggtgacaaggaacctcgtgcccgatggcgccaacgtccccgtcacgaacgaaaaccggatccggtacatccacttgatggccaactacaagctgaacgtgctctcgtccatggagagcgccgcgttcctcaagggcttccgtgacttgatcccgggcacttggattcagatgttcgcgcccgccgagctgcagatgctcatcgggggtacagccaccaacatcgacatcgacgactgggagcgccacacgcagtacggaggcggctaccacccgtcacagccgatcatccagtggttctgggacatcgtgaggaacgacttcaagcccgaagaccgcgcggcgctgctcaagttcatcacgagctgctctcgccagccgctgctgggcttctcgcagttgtacccgcagatctgcatccaccaggtgcgagtggaggacaacgagcgactgccgtccagcgccacgtgcatgaacctgctcaagctgccggcgtactcgaacaaggaggccatgcggaggaagctgctctacgccattagatccaacgcaggcttcgacctctcctgaagagaagagaagatacaatacagaccacacgttcagttggcgtacactcatacatacaactacagaggagagctatgctgtgccgtttgcgcgtgcccggtcgcagatcattcctgattcctcctccccgtagacgaaaagatccgaacgagtccagcgcaacggcggaacatggtgagaggctacggaacggagaccgtgggtgcgtgcgtgtgtgtggtgctagctagacatggagcggagcggtatttaaccactgccttttgatgctgtgactgcagactttgcgcgcgagcaggatgccttcatcgaccacccggtcggtagcagtcgctcgcgctcccgcagctcgtggggggcgatagcgctcgctgcagttgtggggttggctggtatgagctacgcagtcacgatgcacaagtcgttggcagcccagcaagaaatgatcgcgaggatgctgtgagggcccttagatgttttcataagcgcggatctcttgtggatatgaagctgatgatgttttaattgttcgtagggactccatgcactcggccgtcgtggtggacgacatgacctgggacagcaagaagaagaagttcaagaaggccaagaagttcccgaccaagtttgcggtcgactttgtcactccactgaagacgcaggacgagcgcggcacgtgctgggacttcgctactgtcggcgtgctggagaacagctatcgccagcagggaatcgcccacgggtggctgaaggaggacgagtacatggccatctcagagcaagcgtacggcgcggaggtgctgcgactgtgcgcggggcctccgggctccccgcagcaagtggcgtgcttgatcccggacaacggcatctggaagaacacgacggagggaggggattcgacgctgctcatgtacctcatgaacggcctgaaggacaacatctacccgcactcgatctgcccgtactaccctgacgatggcaacgacactgtgtgcgccggcctgacgcccgagaagcgcaagaccaacccactgagtctcaagctcaagcggatggatacactcatggatgagatgtcgatcaagcgcgcgctggtgaagcaccgccaagccatgtcattgacgactgcgacgccctacactacccactactacccgtgcatcggtgaagttgctggccaagagcgatgcgatccagcgtcgacgttgtgtacgttgtgccctccggagttggcgttgaccacgtgctgcgtccccatcaacggaggagagaattacaacatgaacggcgagttcatcaccagccacgtgatgaacgtcgaaggagggcacgtgatgacgctcgtgggctacaacgacctgttccgcaccaagcagggcttcactggcggcttcatcctcaagaactcgtggttcgacggcatccaccccgcgctcggccccacgcacgcgcgaggcagccacagtctcaagtactggctgcaggagatcaccgagtgggaggaggccagcatgtgccccaacagctacgaccccgagaactggtaccagtgcggcaacacggccgaggtgatcgacgcgaggcgccacggcaatggcgaccccggcatgaacatcccgttgcccattcggcgatccagcaccatcggaggcggcgtggagtcgtgtctgtcggaggagacgcagctctacgcgagagtgaacctgcagccgctgcacttgcgctgcacggacccgagcttctgcgtcgtgagcgacgactacacgtacttcgtgcgcaacacgacgcagtggggggaccgcatgctgcgtatgtgtctgttcgagtacgacgccatgacgcgcaactcgacggagctgtgtctgccgccgatgctggcgcagaagatcgcgtacgtgctgtcgcccgtgccggaggaggtgcgcgagaacgacccggacgtgtgcggcttctacttctacccgtacgaggtgcagcagcgctacaagacgcagttcggcaacttctacgtcaacgacttcgacatcgagtggcacgcgcagtcgttcgcggccaacaaggcgcagttccccggcctggactacagcgacgtggagaagtcgacacgcaagcagaaccagtacgagttcgtggggcccttcccattcgcgcgcatcgtcgacaagaaggacctgccgagcgtgaaagaggtgtgaaaggaccaagaagtttaagcaagagcttaggtagtataaggttgggccatgaatataaccacggtggctcgcattcttcaattcgtcatcccgcaagttcaccaccgttgctatcctagctgttaacagcccccagtgatgccctccatctcctccttgatcatctcaggagccggcccagtcgggtatgtgctacgtacgatcgattcgttctgcgacgcaatgaaggagacgaaaggtgcgtgcaagtgcctccatagtcgactcgtggagatctcccacgagctagagaagctggagggcaagagcccaaccgaacgcccgccaactcacgtactcgacacgttcgtggctatcgtcgcacagttcttgcgctacctggagcgctgtcggaacaaggggctcgtctttcgtgtcgtggggcacgatgctattacctcagcctctacgaggatgtcaccgcgctgtccgacgcggttcaggtgaccaacatgcaggactggagagagcagttcgacgatgatctcagtgtggcgaagatgatcatggttgccatggttcgggacaacgcgatggttctacgagacctgcaggacccatgggcgcagcgagaagccctgctaacgctgcggttcgagatcgagcagcggccaggaagacactgcgaagagtcatgctgtccatgatgacaacagttatcgcagggaccacgaagcaaaaacctgctgcgaacattattgagccgccgtggtttttctcggtctgcgagatcgaagtggagcccaacccgttcgcctgttggtcctttggaacggttcttcacgaaatttggggacccggcacgaaagtggtggttaaacgattcctcatcgatggcaaagtggtgggcgttcgggagcaagcgaggatcgagaaggagatcaacatttggcaccaactgaaccacccgaacgtgatcaagatgttcggggcttctcatgtcagcttacctccgtttgtcgtttgtgaggatgccgtcaacggggatctcgggtcgtttctggcttgtccgggcaacaagcgagaggcgtggcgacttcggcgctcggcctcgactacatccacaagaacggcgtcgtgcatggcgacttgaagctcaacaacatcctggtgggggcagatcggatggccaagctggcggactttgggctcagctccatgaggacgtactcgacgctgtccaaagcttcgagcacatgcagttcagtctcggtcaccgtgcgctagcacgcgcctgagcggcttggacaacaaccaacgtttgcatctaatgtgtactcgctgaccatgtgcatgattgaggccgcgacggaggagccccctttcggttcgtgaaaagctcaatggaggagtcatccccccacggccaaaagaactgaacgacagggagtgggggttggtggttgcgatgacgaccagtgatcctgcctagcgcctcacactcggcagcgtgatcgagcgacttcaaggccttggggatttcgacgcgattccaaaggtcgaggagagcttgcgtttcgaagacagtagcgaggttgctacggacacaacaagctacagccaagctggaggcattggtagctgcgactcgaaggccgaagcccctactacgccttgtgagattaatgtcgatgctgctccaagctgcagtggcgaaggcactcaaggtgaaagtagtgacagctccaaacctaaacttgctagctcggagtctacgccgatcggcttcaagtcgccctcggccatttctccgccacccctggttgttagtccaatacttccggtcagaaccccaacaatacgcacggttgatggcccaaagcgtacggtcgttcgcccgtcgtctgctgtcattaccgccaagcccccgactccgtctgagaagctcgctacagtgaacggtggcaggcgtaaccagcggatatccccgaaacgcagatcagcgagcagcaaacacttggattggcaacccaaggatttacctcctattccgaagacttctttggagccaagtgtggagaaaccttcaggtgtggctggtctcgtggccttctttcaacgtgaaaagacgaaggatgaagccaaaccaccaagtgaccacgctcgatcggtgctagtggaaggcaaaagagccaatctccctactgcaaccgtccccgcgccccaacaaaaacacaagaattcttccgtgtcgttttctcttggaacgcgtaggctgccgacgatggcctcaagattctaatcgaccagcttcgattcgcggcagacgcccaaaagttcagctgcttgtgggatttgcgtgagcaaggccaaaaagggaagatcgcaagcgttagcgaagacgacgtcagccagctcttagaaccacttcatccaaagcacttcagtcaaatgtacgtcggctactcccatagctagtaacttgcaaatggactgctctttgctattgaggatccgtaggatacagaagtaaaacaatagcgctgtacttaagtaaattcatgcagcagaaggtagtgagcgattgcaagggcacgtagccgaagaaaaccctactgtacgcgcaaattagggccgcccggaatttccaaccattgccgagcattcctgcgaatgggcctgcccccacaactcggagtaagatttattgctggggtctggggagtgtaatccacagtccacacatctcaggagaaatccatggagaaagtagcaggttaaacagaaagcaacagcagaacagggctcgtgacaggtgaacaggggctgtaggtgggcaacagccgaatagtgctaaactttagcagctaaagtaacagctcataaatatcacccaaattctctgcagaccttgcgagcgcttgctatgaacaacgcggccaaccaaaaggcaatctcggagtacggatgtatcccactgctcgtcaaattgatcgacagatttcaagacaatgcggtgaggcgttggtactaaacaacccagtgaaccgagaactggttgtggagaacgggggggtatcaccaagggctgaggggtggatgtagaggaggagaaaccaatgcgctgacggtgttgagaatactggcagtgagttccttggcttaccgcaaggcaatcaccgaagccggcggcgttgacacggtgcttcaagctgctcacaatgcgtcaacaaatcggcaggcatcgcacgcatacgcaacattggaagcaattcaacatggcagcgctcgcttcgatacacactaggcgtgctggcgcttgctttggtgcccgccagctatgcgtgtgtcttgaagcgtggagtggagcttaacccaatcaaattcgaaggcggacaaacgcgttcgagctgtcgtggttgcttctgcttagccgtctcaaataccagaccactgaaaacctaccgtatgagcataaattaggtattgaatagagcttcgttgcatggtgtggccaccacgactatcacgacaaacaccagctacttcgagtcatacgaaggcatgagaaacattccaagatcggcggcactccgtcacacgtagcctcttctcaaagggcatggtgcttttcatggcttgatcgcgatgacaactcaatacactcagctcgagctgcatgcagcattggtttgatgatcttcatgaattccaggtttgaaagcttcaagtatcccacatacagcttcgtctatggaataatggtcaaagttcgccaaggctttggcgagttttgaaaggaaggtaaggccggccaaccaaatcattcttttgaacgacgaaaacaatgcagaatgatgaagaatgtgtattgattgacttggtaagtgcggggttgaatcaacgctttcaacgccgcagctttcgtactgactcgacttcttttacgatgtttagtaggccttgacgcacaggttgttagcgcactcgtatccagcgccgcagccgttctggaagcgtccggtggcgacgttgaagcactcgccctcgtacatggggccgcggcagaagttggttccgttctcgcagtactggtccgactcggtgcacttcaagtagcacacggagggggagaacgtcgccggcgggatcgtcgagcacttgttgttgatgcacgagaagcccggagcgcagccgttctggtacttggcagtggccgggttgtagcattctccattgtagctggggccgcggcacgcggtagtgccgatctcccagtacgttccgctggggcatcccgtgtacatgccataggaggtggagccaactgcagttgggggtcgagtacttggcgcagtagttggcgcagtagttggcgcggtggtgggggccatagttggagcggtggtgggcgccatggttggagcggtggtgggcgccatggttggagcggtggtgaccgtgggcgtgtcgtcgatgacgcactcgcacctgttgtcgaagcattcgtatccttcttcacaactgctcacgtactcgctcgtgatctcgctgaggcaccagccttggaacggtgggccgtggcaagtgggctctgacggggtgcagtacgtgcccactgcacaaaaggcgcactcatcatcagtcgtgatgacaagagtttgcgcggctgacaagaggacgccagcgtcgatggcagcagcgaaagcgaggatggacgagaacttcatcgttaggtagctgggggtagctgggggtagctgggggctgtagacttgtagtcgatagcgcgagttgaggaatgaggattgaggaggaaggaggagaacttggtgacgaggaccgttgagatcactagagctcgtgggtgcaacagcctccgcagcatcccgttgtattgcttcgcagttctcggtgttctacgagaagtttccaccaccgtgggcgtcttcacacttgattttgggaactcggtctcagtatttggccgtttcctgcgatgtcatagcaatcacactgctgacccaagattagccggtggcaagcagcaagtttcattggaattttgatggcgagtcatgctgtccgtgtctgcaagacgaagcagcatcagactttccacgagattgagaatggaaagtgagcgaaacccctcgggagccagcaacattccggtatgccaacggcgaggcttcagctggattcgttgattcgctggtcgcaaccacctcacccacaaccttcatcaattatccacattgaaacttcccaacgagaaacatctcattcacctcattcatcgcaacttgccatcacgggatacattcccttgaatctgaagtttcaacttcaggaatgcagatttgtgacctgtcactaaagacgtaaaagcagcggccatcaacactcgacttcgacatgcctcccaccaagtttgacaacgctgttcgtgcacgcgcataactgcatcacttccccaatgtattgacacgggttactgtgctgctgctgctgcaggagtgcgccaagctgcagcgcgagtcgctcaactgcctcatcagtaagtgagaccgtgtcctcgtcccaaaagctgcgctccacgtcgccactaatgcaacacattgcggatatttcactcccccccccctccagacaacgaagacaacaagaacgcgtgtcagaccttcttcgaccgctacaagcagtgcctgaaggaccgtcgcgagcgcgagatcgctgagcgcagggcgcgactccggggataagcagacagctcaagagagttaacgcccaaccagtgcgagcgtcgttgatatgtggtgctgcagcgctgtatagtgaaacacgaacaaaaacccaagctgcgtcatatagtcggcagctgcttaatccctgcctcctcgtccgtctcgacgccgaccaggtcaatcacggccttgggcttcttctccattccgtccgcgatttggtttactccgtccatcgcaatgcgcttgcgtgccacccatgccgtctaccagaacacacgtgcacacacacacacacacgaacgccgtaagttcctcgagctgtccaaagagagagaagagtcgccaaacacgtacccgatacttggtgaacttgcgcttcaacgcgtccttcctaccaggcgacacaggtgctcggcctggctggtccagcgtctccactttcttctccagctcccctgcttcctcatcgagctgcttcaacgccgcatccaagtccgcatctgaaatctgcgacgtgataccggcaagtgttgcctcggcgctcttcagctcctgctcggaggcagcgcagtccgcagtcaccgccttaatctgctcctccagagcgagacgctcctcttccgacggcaccggcaggttgttctggttcatgtagtagatcttggccttgccgtacgtcttgcccaccagctcctccctgcaatacatcccaaaatcagtctcactcactcactcaactcaacacaaacaacactaacgcagcttcgtacttggccacgagattgtccagcaacttggtcagcgacggcttggcaatgactcggtgcatgttctcgaacacattgagcagactgtagggccgattcgtctgcaataaacgataaacacgtcagcacctgcgcccccactacataataataataataattgcaattcgaccttgcgcatatagtcgagcacggccgcctccgcctcgtcggccttcatgggcttgggcttgggagccgccggggacttcttcgaggcattggcagcagctggggccttggccttagtggatttaatagcagctgcagtcttgggcgttgccgccttcttggctggggctgcgctgggcttggagctcttggcaggagacggcgtgcgcttgggcgcaggcttcttgggcgacacgcgcgccttcttgggcttgggcgccagctcctccaggtccgacgcgtcggactcctcggcaaagtcgtcctcttcaccctcttcttcttcttcttcttcttcagcctcggcgtcttccggcgcgaagtcgtcctccgagtcgtcctcgcccagagagaagtcttcgtcgtcgaagtcgctcatgattgtcgaagaggaacccgccaaaatggaatttgtgcgaatgaaaatgacaatagtgagcataaaaaacatttttacaccggattcaactcgattcaactcggatgtacaaacgtttcagcccccaaataaaatatttttcacactgcagcttcctactacctgctcaagtctgcactgacgtcgttttcgctgacgagtttggccttgatggcttccggctcctctaatttcccgttactggccgagcttggggtggaacccggagtcgatcgatctgccgtgctgtccactgtgctttcggtggtcgttctgcaaaaggtaggaatgggtttctccgggctgtcagcttggccagcactgtccgacgacgtgtcttcctcgataacttggggcagtggggacccaggcacagcaaagaggcccttgaacgcctcaaagtccacgaacccgtcgcccttgctgtcgacggacgcaatcatctccttcacctcctcggccaccatcgagtgcttgaacacatcttggagccccacaatcgataggcggccctgcttctcgccgtccaggatgccgaacgcctccttgatagtgttctggccaatgtcgcgctgatccatgacggcagccatgaactccaagaagttaatgtggccacttttggactggttgatacgcttgaagagctcgccagcgtccgcattcgagacgccgcactccaccagagcgctgcagaactcgtcgtgcgacagcgagcccttcttcgtgcggtccatcgagtggaagacttcagctgccatctcctgctggatgtggtcctctgagatcccgagagccaccgacaggagcgccgtctgcttcatcttacggcactgactgaaactcaacatgttcgtcagcaggatgcgcttgtccgtctgaagccgcgcagcgctggatccatccgcgctggtcatattaccttcagtgagccacttgtgatccagcgcttgctccgccgacagtcgctggtccacgttttccttcacaagcgacttgatgaagtttatggagctgggggagaacttggaccacacgtcgttctcgaagaggagcactccgtcgtagatgttgcccattgtctcgtccatcgtcgcgccatggaacggcgacacccccgagaggagctcgaagcagatgacgccgacgctccagaggtcgcacttctcattgtagtccccgtccagcacttcaggagccacgtagtcgatcgtgcccagcggcttgaccagcttctctccgcgcttgaagcgcgtgctgagcccaaagtcgcacagacgcagtgatccgggcttttcggcgttctcgagcagcaggttctcgagcttgaggtctcggtgcgtgataaagttggagtgcaggaaggccaccgcgcgtagcagcgcgcggatgatgcggcgcacgtcgttctcggagaacttgcggtgctcctggtacaggtggtcgtacagctccttgcccttgcagagctgcatgatcatgtacatgtgctccttgtcctcgtacgagccgatgacgcgcacgatctgcgggtggtgcagccgcttgaggatgttgacctcgttgcgcagcgcgtcgcggtccacctcgttgctgagcgccacgaccttgacggcccactccttgcccgacttcttgctcacggcgtgcttgacgcagccgaagtggcccgtgccgatggtggcgctgaagtcgaagaactcggtgatgtcgtccacgtacttgtgctggatcaggtcggacgtcaggtcgtcgcgcaggctgccgcgcgcctcgcgcgccgtgggggcggcggcggtggagcccacgacggcgtcggccttggactggcggcaccccatggcttcagttcttcttcttctgctgctgctcttgctggatcgagaacgccactgactgaagtaatgagcagagcgataagacgtcaatggtttgaggaggagccgtgaatatccgccagcgtttgtgcgtgacatgtgtgggagggcggacctacgtctggacgctaagaatagcccggctcagtgtgtggtggggtggggtttaccacctgtcgcctgctgcctgcgtcacgccactggggggcgtctgtgagcggtggagggggtttgggaggtttcgctcgctcggtcacagggtctgcactgcctacttggcggcgaattcgagactgcgctgcagcgttagcgtggcgcgcggctttccctcgagaacgagcgacacgttgggcgcactaggcgtttgcatgcgcgcagagacgggcggcggcccttggttgaagcggccgtcaggtcaaccaaccacttgctgcgctcgacgagctcagattcgtctccgcctacagctgcactgatgactttgtttgtgtttgctcgtatggttgccatcatacatgtgctgtgctctctgtggttgcgcactgctacatgtagcaacagcagcaactgtggcagcggtttctctcgtttgagccggacgcgcgccatgggctccaagcagcagatgcgcagacgaacatcttgcactctggtggtctattccttgaagcaacaccgcccactgcttggcaagcagcgagcgaggtctctaccctaaattctctctatgagaagttaaacttgaagtcgccactggcagcagcagcactgtcgtccgcggtcttcttccgcagctcgcgctgccgagtggccgccaggttccgccggccttgaccatagcgcaggtgcatcttggccacctcgctctccgtgcccgtggccttgcggagtttcagaaacgacgacgccgacttggcggccggacccttggaggccgtcgtcgcctcctgcttcttctgctgcttctgctgctgctgtttgccctgcgctggctttgccgctgcgtcggttggtcgcccgctcgcggcgtcctcgctcttctctgctgcctcgccgtcgtcagcctgctcgcccgccttcttggcccgtcgcttcttgcggcgcttgcggttgcggttgcgcttcttggcgctgccctcgccctcagcgtcggcctcggcggtctcggagatgctgaagtcgaacttgaacacggtctcggccgccttgctggccgcctccaggatctcctcgggcgtggcctcctccagtttctcgccgcgctcctccatctgcttcaccgtggccatgatgcgccgcttggcctcgaagtgcgcggccagcggcgctcccgccggcgcctcctgcgtcccattcatttttgcctaatgcttgtccaacttattaaacccgtccaactgtaacgaaatgaccgcaccagtaaacatacaaaatccaagctaaaacgcaccatcacaacagatttgaggttaaataacgcgttatatcgtctaagagctcaaattgagccctgctcttttgagctcttcccacgtcatgacggtgctgctgccctccttcatcgccgacggcaactggttcctgctggcgctggcgctgcccgtggcggcccttggggcgctggtgcaccctcgctggcgcgtgcgcttcggcgacgtctcgcggcgcagcgccaagcggctgtacctgctgtgggcgctgctggtactgagcgcgatgctgggcgtgctgggcgtgtcgctggaggtctaccacgcgcgcggctgccccaacagctccgtgttccgctacgagatcgagaacctggcgcggttcgtgtacgagttgtgtgcgcggcagcacgtgccgtactgggcggcgttcggcaacttgctgttcgtcatgcgcggccagcgccgcatccccgcgggcgacacggactcggacattggcgtggtcaagacggacttcatgcgccagtttggcagcgtcagcaatttctcggaagtcgtgcgacgagaggcctacctggagctgcagagacccgtgtacgtggtgtaccacacggagcgggagctggtgcagatctacctggacgaggagaccaagggctcccacgccgacatttggttctaccgcgaggaggtggataaagagactggggtgaagtggctggtgaatgacgaccgcactatccgaggcaagtggctgctctacgaccaggtgctgccgctgcacgaggagccggcgttcttcctgaatgtcccagtgacggtgccacgcaatgcgagttacttggcaagagccgagtacggagccaacttcatgacgcccattacgatgaggatggagtgcatcgagaacatgatcaacggctacacattctacaagacgccgttcacaatgaagctgcggtacgcgaccttgttcgtggtgtttgtggcggcgctcacattactaccagcgaacttcatttcgcctcttagtcgagcgttgcagctccacaagagaaaagcgggagcgaggtcaggaagtccgagctcgggcgcgccacaggacaagtacttcgtgtaacacctttttatcaaattgatccgggacatgcactagacaccgccgctctctagaacttgttcttgtgcttgcctttgcccttggcttggcgaccgctagaggtctgtgtggacatggggaccatgagcggcgggatcttcggcgggccctgcagcagcagcttctggatgtccacccactccatagcctcgaactcctcgttgtgaatgagactgccggggtccatgcggtccaggtacatgacaccgttgaggtggtcgagctcgtgctggaagacacgggcggggaagtccaccagcgtctcctggatcttgcggccttcagcgtcctcgtactgcactcggatctcctgagcgcgcttgacgatgccctggtagccgggcacgctcaagcagccttcgaagtcgcgcttggtcgagtccgacatggccacgatctccggattcagcacctcctggtagtccagtttgtccaggtcgtcctcgttctccggcatgttcttgatcatcaggaacatgcgcaggttgtgggcgagctgcggcgccgcgatgcccacgcccgcctccaggcgctgcaatttcaatacaattctcacttgttagctccagatctgggcagtgtactgtacaacctatatcattgtatttgcatagtgtcgatacttaccacttcctgctccatcgactccagcagcctacggacggccggagccttcacgtcagccacagacttggacactcgccgcagagctggaacaccaacacgaaaatcgcaatttctcagcccacagatatcgtcaaacgaccaaagttgttgaggcaataagagaacacagccacgcatgcgtggctgtgtatatcatcgctaacggatgcttctaagctggggacgacgtaccggagttgccgaggaacacaagcgtcatgttcacctgaccaccgtggaaatgtgtcttaaaaaatgtatgccagtttttgggtaacagttgaagagcaagaccacaaatgttctttaattgtaaattctaacggcgagttttattatatataacggttaatgcggcgtccacctcgcgttgtcgtccgatgtccaccttgcttcttgtgtgctgtccttgcttgtcgagggggcgtggcttggcacgagtccgtcgtccccctctcacatgcactacatacagaggggaaggcttcgaaacgggttagacgcatgcgagcttggtgtcgcagctgctgaggcaaatggcgaacgcttggaacggagacagcggccactggaagtccatcgtgaacatgtcgtcggctacgcgcccgaactgcaggatgttgcccatggacgggtcctcgctgctgatcaactggaagttcttcaccgacgccatggacacgcgaccaccgaagtccaggcagtaggcgcccaggtcctcgcggaacacgggctcgcggttcgagaagcgcatcaagtccttcatgtcgcccgtcgacaggcgcgtgacgagtcggtcttggcggctcatgggccgcacgatcttggaggagccgccctcttcgtccacatcggggatcaccacgcgcatcttccgcggccccacactcgtgcggttgggttcatacgttacgcagcccagctcctctcggatctgaagcacgttctgcaccaccacgtcgtcggaactcacggcgtcctgaatcttggccagcttctgcggatcccggccgttatcgtagagcgtaaagcacgtgccaaggaagttggagcccatgcgtccgatgcgctttgcgtccgtgcactctttgtctgtacagattgtgtagttggccgtcatgttcgagcgcacttggcgtcttgcggccaggaggaacttgtcctcctcctgcgtgccgatctgaccctgcaggtacagctcgtacccgtactgcttgaacatgccgcgatagacctgcttgacgtagcatcgaatgatgcccgcgtccaggggcacgggctggagagccatcttggtcatatcctgcagctccagcttctgcatgggttggagcacaagcgggtcacaggccccgcgacacaacgggcagctccccgactggcccagccaggccatgatgcatcggtagtgcacgtatgcgcccgtgcactggcccgtgcaaggcagcgggtaggctttgcgtcttgccgagaactcgtccatgcagataaggcagccttcgctgtcgtccgggacgtcggcgcccttgtcctccagttccttggagggcggcatcttctccgcgtgcacttggatctggccacggcccgaggcggcgaatccctcctcgtccagcgcgtccggtttcctgtcgtcggggcgcagtgtgtccacctctccgtctccttcctcctcctctacttttccctcttcctcgtcgcctagacgaacgcgcacactggcgacatccagcgcgttctgcgactgcctctgggcgcgccgacgcggcgagaacatggcaagatccacgggcggggcgtccgcgaatgcgtgtggcgagtggtagactgcgcggggcgacgcgtgcctcgcggcgacgctcgaggcgcccgacgtgccgacagacaacgcggcgacgccgctcgcaacggctctcgggctgcgcgcggcggctgagcgcggggaaagggccgactcggtgagcgagcgctcgtagctgcgcaggaggtcgcgcgcgtccgcggggggcgccacggcgacgacgtccgacgctgggggcggggcggccatgttggtggtggatggggtttcgctcgtttctgctggttgaatcgcgcgccagacgctgctcggggcggcggatgcgatgggcgtgcgggctgctgcgggcggatcgcgctctgggcgctgcggggcggacggcgacggctggcggcgactggagcggagctcggggcttctcttccgccggcttcttgtttttgtatgggaccctgacaagaaggcgaagagcgcgaggcatactggagccaagtgcgttgggttgagtgtgcttattggcggaaaatcaacgacgcagaaacgtgcgcgcctgagaacacggcgttccactatagaacacttcaagtgtacattagatcttttggctcgcttcgcttaccaccgaatggcgcagggccaagctgcccttgtatgcttgcacgcttcctgtagatccagctgttgagcgtagttatgttggcgctggagtaatatgcaggatatatggacgggaatcgctacgttgcctcgcagtgttgtggtcgggcgacaactcaagggagttggtgaaggtctgaagggccaaggcggcagaaatcatgtcggtggggcaggcagaagttcgactgatcgatgcgccatgcgcgattcgtggactggttgctctatatgctgggttgtcaagctggtcgccgcgtaactaactgctctccagcggagcaaccttcatggaaggagaagctggtaacgttttatcttccgcagggttttcatttataacttaatgcacttacgactgcgagcaagtattgtagttccttgcttatccgcacatgtagtcgaggtcgtcacgccatattctgcaacctggctatccgtctttccacctcggccaatcgtatatccgctaaagctagccctctatcgactccagccagctcaaactccactttggtcaactctctcaccgctttatcgagcacttccccggtttcagctaggccttttcccacttcagccaacccccttcctgccttcgtcagtgctgcacttcgggccgctagtgcttgtgttgtcgtcgtcttcgcaggagttgtcgctgatgctgaagcagacactacaaaggggagattcttcttcttcaagacttgctctgggccagccttcgacagcactcgagattcccgcatgcttgccagcaggaattatgaattgtttccacccaccaacaccttcgcgagtcgcgagtcgcgactcgactgactgaagtcgagccgctcgattgctttacggttatggaccagcaactttgagcgcaacccgtccgtcattatctgctgttggtgcttggaggaagcagcttggatcgacatctaccactccaacttacccatacgagtccgaagcgccctaaaaaaggctaaaattgcccagttttcaccagtccaacctcccaaaaacgcctgtacacgtcacttcgcagcggagcaccatgcaggcgctgcgcctggccttctggcggaagccgctgcacctggagacgtcgtcgtcgcactcgctgcagcatggaggagacgacgcgcccgagatggtgcgcacgctggggctgttcgacctcgtgatgatcggcatcgggggcaccgtgggctcgggcgtcttcgccaccgcggggctcatcgccagcagctacgcggggcccgcggccacgctgtcgtggctgctggcgggcgccggctgcctgctgagcggcctgagcttcatggagctggcctgcctcatccccagcgccggcagcacgtacgcgtacgcgtaccacgcgctgggcgagctgccggcgctggtcgcgggcttcctgctcacgctcgagtacggcgtgtccagcgcgggcggcgcgcgcagctggagcgacaagctcacgcagtggatggagtcgcagctgggcgtgcagggccccgagtggatgaagcccaaggactcggtcgtggacctgtacgcggggctgctcatggccggcagcacggccatcgtgctctgcggcatgcaggcgggcaagctcgtggtgaacgtcgtgaccatgaccaagatcacggtcgtggccttcattattgtggtggggctggccaacttcgacgccggtcgaatctcccccttcgtgcccgaccagagcgtcgtggaagtgaacggcaaggagacggtggccttcggctggcccggcgtgctactgggggccagcgccagcttctacgggtacattgggtacgacgaggtgtgctgcttggctggggaggccaaggacccggcgagaaacatcccccgtgcagtggtggggacgatcctcggagccgcgacgttgagcatcttggccacgttcgccctcgtgggcatgcagaagtacacggacattgacgcggaggagtcttacggcaacgccttcaccagtatcgggatggactgggcggcgtccttcgtggcgtccggggaggtgctgaccatgccgatcacgtcgttcattggctttatggcgcagccgcgcgtgcagtacgcgatggccaaggacgggttgctgccggccacgttcgcggaggtggacgccaagggcaacctgttccgcggcacgctgctgtgtggcattggggtcactgcactcgcagtgtttgtgccgttccacgtgctgtggaacttcatctcgctcggtattctagtggcgttcaacctcaccaacagctcgctgctctttgttcgtgcctcgaatagtaccaacgtggaggaaggcgaagcagaagacgccactgtgaagaggtcgcagggtgcgatgatcgctgggtacttgatttcatcttttcttgcagcgttccactggcaaaaggaggtagtcgccagcgtcccgctctccgcgacgacagacatctcgcttttcgacagctacatgcggacagtggggcctttcgtcgctgcgctcttcacagtggtggcgatcgctctgatgttcgcgctgagcgatgctgagaagaagcagacaatcgcctcggctattgctgcggcgaaggtgaaggcccaagcgcagggaggacccgtagagatcgtactgtcttccaagaaccaagagaaatcgtctgacgaggctcaaaggagctgccatcacagaaaccgctctttagatcgggacgacgatgaaaatggccttgagagtgaagacgacgaggctgcgaagctctccgactcgaattctttggagaaagggcggccgtcgtcgaatggaggaaccgtagtgagcagtgacagcgacgaggagaaggctgaagcctccagtaccagcctcgacgaagacgatgccgacgtcgagacgtctacattccgagccccattcgtgccgtttgccccgtgtgtggccattttcttcaactggttcttgttcgcccaaatggacggaatgagcgtgctgctcattctgctgtggctgctcctcgctgtggttgtgtacttcggctacagccgccaccacagtctcgctttccagcagacaaagtaccagcaactcgcccagaactagaaggaatgaagcaatacaaggcaagaccagcacatatcaagatactgcgtaagacaagtgactcatgttcaagcctcagaacctgcgcccaagagcctagcaagtgtataagctaaaatactcccacttcctgacgatgtgaagacgggttggttgggaatgttttcgtggttacagaccacctgcaatgccgaggttgagctgctgctgacgctgttgctgcgcgacgtggagcgtgttgaggtcctgtagtgtgcggaagcagtcctgcttgaggtgctcgtagtcgacctcccgagacttggagtcgatgtactccttcaagtggaagatgttctgctcgtggtgccgcagcttctgctccagtgcgtccaagttcttggctgtctcctgcgaggcagtctcctgcaccaagttctcgagctgcgtggtgagagctgtgacctgttgacgcatggcgtcgcgacggccgatgtactgcttcttgaggcggagcaggtgctgcttggtctgcgcgtggatctcctgcagctggtccagcttatcgaactcggccatgtcggccgtcatggtgtccatcttctgcagcagactgctgagctccagcgcgatcttggcgtccagcgtgttgaccttgtccagctccgcctgacgcttctgcagttccatggtcagccgctgcttggtggtgacggacgactcgagctgtcgctccttgaagctcaagtcgcgtcgcatctcctcgagattggcggcgttggtgcccggcagtttgtcctccttggccatgcctgctgaaatgtgctccagtagctgaacgatcaccacttgggctgtgcgttgggcctgcatctccgcctccttcttggccgggaactgctcgaggaaggccgtcatctccttgtctttggcgaagagcgcctcgtacttgtgcgccgggtcactgccgctcgcgcgctcgtccagatcgctctgaaggtcagcgagagctttggtgagctccgccttctcggccgctgtggactggagcacgccttcgagcgcctccatcttgctcttgtcctctttgactttggccaaaagcacggcgcgcgcctcgttcgggtccatctgcgccgtcttggcgtcctcctcggccgcgtcgcgctccttctgaagacgacgcacctgacgctcgagcgcctcgtactcgtctcgatagcggtcggagctcagctcggcttctttctggtggatggcgtgcatgacgagctccagctcctgggaccgcgcctcgatctccacctccgtctgatggtgctcctccagcagctccttgtagcgctgcagcttttgcggcgccaactggttgatcttgtcctggtgcttgccgtggatctccgtcatctcggcctccatgttgcgcacgctcttctcctgctccttgttcatgaggaagacgcggtcgacgtcttcggcctctttggcgttgcgttggtgcagttgctcctgcacctggcggatctccgcgggatccgtggcgctgcgcatcttgtccatggccaggttgtagtccgcgagctggccctccaggtcgcgcacctcgagcgccatggtctcgtacttgcgctcgagctgcgcgcactgcgccttgtctttggcgtcctgctcgatctcgcgctgcagcttctcgatctcgctcgtgatctccgccgtcttgctgtgcagtttgcctttgaagtaggacgcgtcctgcacctgtcgcccaggtccggcacttccagtgccaatgcgcatgcccatcatgccctgctgagtcacggggcgatcggagacgttcacctccgtgttgaggctaatgccgaagcccgccgtctggcctggagtagcgggcgcttgttgacccgttcccagtctcccagtcagcggccgcccgcccgaagcagagctaagcattccacgctggcccgttccaggacgaactcccgtgatcgggttgagactctgccccgtgccaggtcgacccgatgggagacctcccacgggtgcagctccattggggccaccgccggctccggtgccggggcgttggccagagctcgttccaggacgtccggacatgaatgaactggcagtcgcttggatctcgacgcgatcgaattagtgagtgactgcttagagaggcgcaggctgcactattgcaacgcgtgactcttcatgcgcacagctgaattagctcgtgtagcagtggcaaggcgcatgacggagcagtgctcgagccaagctgcgtagtgtctcgcgttgagttggagttgactctacactgctggtgcgagaatacgcacgagcgagctgcattttcatcttcagcttcgagtctttgggagtctcgaatgcgttttcgtcgtactggttggcagtcatgaatggcggtggagattcgacagctgcgggtgatcggtgctcgtcgtccgggagatccaaggcgtgtaaggcggcgcagattcctaccgctcgacatcgctcatgcaaattggcgttcgactgggcgtggtcgtgctcgtagtcgaaaaagcgcaggtagactcgcacaatatgcgcgagcagctcaagtgagctcgtgtcgttgcagtcacctctgtcccttgattcctgcctgttgaccaggagcttggtgaggacggcgtgcgttgcaacgtcgatcttgtactcgcgttccacgagataacgcatgttcttgcctgcatcaggacaattgacgtgatacagaagataacgttagccggtcgtgatcttgatcctggaacgaggaaaagcacattaccattcgctagcaccagcgcgatcagcttgagcacggccgcgacgttgagtacctctgttccggatcccttcaccccaactactgcctcagcctcaatttcgagaagttgtacgaggaagtccaagataaaggcagcggtggcagctagctggccgtcactgttatatctacacagccagatatcctccacgagcccaagccacacagtgacaatgtttaggacggcagtgtcgtcgtcttcctccggtttggccttgcgaacggcgagtgtcaccatcgccaacaagttaaaattctcgcgagttcgaagccacgttcggagctgcacaacgtcgttgtctactggttgggtgaggctgcgaagaagtttcatcgtccagaagacaaagctccggtatgctgaactcaacgcgctaccgtccaaaaccaccgctagccacggccgaattgcgtcgagaagctgactcaaatcctccacagcccatgagactgggagatcggaccgaggacttgcctttctacttggtggcaacgggctgtgcatcagcgccaggcctcccagcaggtacctgagcgtcgacaccctggtttcattggagatgtcgtctgtgctgggtgggctattggttagctgaaagatgaggcgacgaacgactggaagagcgccgtccgcatccagcgctttcctgacattgtatttagtcagcgtgaacagaagaaaggaggtgtggtgacgtgcagatgaaattgctgtggtgaaatgctgcggagactccggagcatcttttgacggaagaacagcttcgtgcaggcgaagaacttgtagtggcagccgatggctgaggtgattctggcaaaactgcagactatgcgccccgttctcgcctcggaacagcagtaaatgataaagcagctcaaccaccaagtgggcgatctccacatcttcgtcgaagcggaacagaacgtctcggctggttgccataacgttggccttgatgagagccgtcaagaatctgcgagtgcgtgtgccacgaggggctgccatgcagtgacggacaagccgcacgaaacatcggagagcgttgaactgaaggtctcgcagcgcgggaaagcgcgacaggacgttgcgaattactgtgataaactcggcacgcactaaaagttggtcgatgtctgtcgtcaccagctccccgtgaggatttacaggagcacggtccgactcagcttcatcgatcaaggcgattattgtgcacaacacccactgctgtacgtcttcgtcattggggaactcgtgagctgcttcgatcagcccgcattggtcccatagttcctgctgctcctgcatccagtgctggtgcgtctcctccgtcagcatcaacattcgttcgagctcttctcgagcacactgctgccgatactgcgcgtcacggaagatatttttccacatgagcgcgatttggttctgctccttctgcagcagaacctgctggtccgtgtacatcgctcgcttgatctccagtgtgtctttggacttttgcacctgctcactccactcgcggtccactctgttcgtggcttgcagcaccagccacgcctcccacgcgcgactttcccagtcagagtgaagcattgacgcgtgggctttcgctagggtcacttcctcgaagcgactcacagcatctcgatgaatgccaagcagccaagcttcttcttcgcgctccgctgcgaatttttcccgctgtggggacagcagacacttatccaagagcatgtaaggagccacatcaaacgccacgttgtttctctaaaatctcatcacagacaaacgaggttagaacgtgatcctcattcagtgtaaagttttggtaagaacgaaccatatcggggatgtccattcgcgcacccgtttgcaggaggaacgtgaccatttcttcctggttgaacttacacgccacgtgcagcgcagtagagccaactttgttctggagatcgattttcacgccgatgtcgagcagcaatttcgcacagaagatgaacccgtgctgcgagcaaaggtgcagcccggtaccatcggcgcacggggtgtatcgagcagcgttgaagtcaacttttgaacgattttcacgaaggaacttcttgacgctcttgaggttgttctgcagtagatccccccagaacggcctcaacaactccgcgagttgcattgcattgagctttggcgcaacgatggagtgtcttggaccaccgccgacacgggcggtggacggggttgcaaccgtctttcttgctgccgcatcttgtgaaggtagggaggattcctttcgtgatcgattgggcattggaggtgcagttgatcaagtgacgtctgggatatcctgggcgtcaacgagataaaagtagagaacccaggaatagggaaagccgaagaggagtcctcatccggcatctcattgcgaagactaattaagctgtagtcataactcgcgctttagaaaatctcacgttggcacagcaacaatgatcagtgcgaaaacttacctgagaatactaggaatgtttttgtcttctgacggtattcgctgtggcacacccgtacgtgtctgagagcttttcagctagtggccatcttgtccgctagagcttgcgcggtctccgcttggctccgcgcccacagcgcaaggcgttgcgctgcttccgctcgagcttttgctccctccgcttgggcttgagctgcctccatgagacctcgcgctgccctcgcctgggcttgaacaaccagcgcttccgcttcaagcgcctccgcttgggctttcgctgtttccgccagagtttgggctgccttggctggaggcacagcgcccgacgcaatcgccgcctgccgcatggccttcagaccgtcaagttcttctcgtccggagttgttgcagcccaaaacgagaatgaaccccacttctcttttcttctttttcttcaaaccctgtcccgtacagcaacatcagctccaaaatccctccaaaatccaaggtccttttaaattctgttgcggattatactgatccccactataccacttgcagttggagtaagacaaaaggtgaaagagaagaatctaggcctcagttgagaatatacacacgaccaacaaggtggcttttgccgcccagctgagtgttgtcgttgcttccatctctgcgtgagcagcaccaagaggacactccacttcaggatatgagcccaaggctcacgcgtggggagcacagcaactaggacgtcatggcggatcagaagaagacgcccaaggagtcacacgagcagaagaggatgatcccgccgtttgacggcaaggactacgaggtctggcacgagcgagtcaagctcaagctggagaggaagaagctgtggaagtactgcatggaggacttgctcgagccggacgagagcaaggaggcagaggcgcacgcgacgtggacgagcgagatggcccacgccaaggagatcatctacgacgcaatgacgaatcacataatgaagactgtgaggtgtgaacccaccccgtttcgtgtgatggagcgcttaaaaaaaaagatttatgggcaagacgtacctgaagtacgctgaggagagggccaagctcagtcagctacggctcgctcccaacggcaatgtgccagatcacctgagcgagatgcgtcggctgatggaaaccattgctggagtcgggcgtcctgtggacgagtatgtaaagccagcactattgattggatctctgccgcgcgaatatgatcatgttgtacagacgtttctcgccagtcacaagccccaaaatgctgatgatcctcctaattatgatcaacttgaactatggcttacgaccatcgccaaggtcggaaagcagagggcgccaaggacaatgatgatgaagaaaaggcgttctttgctggtggaggaagcggtcgaggacgtggtcgcggccgtggacgtggtggtcgatctggaggacacgggcgcggttccggtggtggacgtggttctggcggtagcggcagccaaggtggtggacgtggaactggacgtggcaaagccggcagtggacaaaagccaggtggtgcttgttatcactgccatgaagcagggcatcatgtgtttgattgcccgtttcttggcaagcgacctccagccgaggatcgcagcagcacccaagctcagaagcgcgtgaagatgagtggaggaaagagtgctaaggctgctgaaacgagtagctacgctaatgaaagtgatgacagcgcgtatgttattcttcaagtgatgaaaatgaaaaagccggtcgcagacaaagcccatgataaccggtacctggactctggtgcatcgagtcatatttcgaaccagctcactgatttcatggagttcacgcctcttagcgcccggattcgagttggaggaaagaactcgctgggtgttgagggtattggtactgtggttaaagagctggagactactggtgggaggtgcttactgacgctgcgaggagttcgttatgcttcagagctgcagtgcagtctctattctgtgcgacggcaactgaaccaatatctgcctgaacgtgatcgtgtgaatgtgcactttgatgaggcagatcgcgctgatgttatcttacaggctggtgtgactaccgctcaagttgattataccaatctctatcgcttgaagttggagagaccccaagaggtagccatgatggcgccaccagctcgagtgagtagtttggagctgtgacattcgagattggggcaccctggcagatactcgtttaatgcgctgttcagctatgatcagtggccgttgccacatgtgaatttgcgtatcccggtgggtttcaattgcgagacctgtgtgacggggaaacttacgaggaagagcatgaagaagtctcggacacagacccgcgagtggttagttggcgaaaaggtccatgtggacgcttggggtccgtatgcagagcactcctacggtggtaaacggtactttgccgtgttcgttgatgatgcgagtcggtttgtcaccgtgtatcttctggagcatcgttcggaagtgtaccagaagtttgaggagtactatcaacgcgtcaagacgcagcagcatgtcagaatgaaagcgctaaggtcagacaatgcaaaggagttcaagaagctgcaaagtacgtgtgagacgaagtatggtatggagtttgacagcagcatcaagcatactccggagcaaaatggtgtcgcggagagaatggtccgcaccattacggagagaatgcgatgcatgctcgtgcacttcgacctgcctgaagcgatgtggggtgaggtagcgatgacagctgcatactccgtgaacattatgccaagctcggttcgaggcatggaggtaccgtatgcagtatggcaccgtcagactcctgcttatgagaagttgcggacgttcggctgcgccgtcctgtcgtacatcgacaaggtggagagacggaagatgcaggcgaaagcacgggaggcggtgttcgttggatattcgcgagagaagcgaggctatcgcttgctcgatagcaagaccaacaaggccttctacagccatactgtcgtgttctatgagaataaagctggtcgattgctcatggactcggcatcaacgccaagtccagcctccggtaaggaatatttaggcgttgatcgatcagtagaggatgacattgagccaatgctggatgaaatgcgtgatgactcaaatgatggaggtagttatcgtgatgatggagattgctggactggtggggccagcgactccagagacggaggtgattatcggactggtggggctgatgacacccgatgtgatgaccgaccaggtggggcagttgagcaagatgtccggtcagatggggcatgtgggtccaagaagagaggccccggtggtgatgccgcagcgcctcgaccaaagagagtgcggtttgcggtgtttgaaagtggacgttctagcaaggtggcagaacgagatgaaggacgtttagtgagctctacagcatctcgatgtgatcgttctagcaaggtggcagaacgtgatgaggaacgtgtcaatggacatgaggcagaccacctgcgaggtgagtgcgtgccaggcaattccaaaagaaggagaaagaggaaacgcagcagtgggcggcacaagggaccggctgctgacgagacgagggctctaccagggagtcaagaggtggaagaggtggacagcaggtcatcggctgctgagcgggccgactcggacagccaagtgtcgagtgatgctgcaagtatggggcgtctatcaacgcctccttgcacagcacttcgtgagtacacaggcccgagaggcactcgccataaagacacggagcggtcgggtaagtaaaccgcccacgtggttcggtgactacgtctacattgcctacgaaaatacaaatccagatgatgatgtgaactcgttgcctgctggatggaggaaagcacgagctgagttgcaacgtgctgtggcgaacgagttgatccttgcatggtgggaggactattgctgcatgagtactggcgagtttgaagagccagatactttcggtgacgctatggagagtgagcactcattgcaatggaaaaatgcagctgatgatgaatttgattcgttgatgaagaacgatacctgggagttggtgccgcgtgagaagcacgtgaaagtgctgcagaatcgctggtctttcgcgtcaagtacctagcgaacggagagatcgaaagattcaaagcgaggctcgtgatcaaggacttcatgcagatttatggtatcgactacctagagatgtactcgcctgttgtgaggctggagacactgcgtgttcttttgacactggcggctgtctgggattatgaagtacatcagatggaagccactactgctttcttgaatggggcgattgacgtggaggtctatatggagcatcctgaaggctacaaagtgaaaggcaaagaggactgggtgtgcagattgaagaagagcctgtacgacttgaagcaggcgcccagagtgtggtttcagctgctcaagtcgttcttggaggagcagggcttcacgatgctgcagtcggaggcctgcgtggctgttaaagtaattgatgggcagttggtcttcatccctctctatgttgatgatctgattttgtttgctccgtcgatggagctcatcaacaagatgaagaagatgttcgaggaccggtttgcgatgaaggatctcggggagttacactacattctaggctgggagatcaggcagaaccgggccgagagaacgatgttcattggtcagcagaagtatgccgagaccgtgctcaagcggttcaacatgcaggactgcaatggctgcaagacgccgagcacggcggatctgaagctgagcaaggccatgtgtccgaccgaaaacgatgaaaggcaactgatgagatcgaagacataccgtgctctggttggcagcctgatgtacctgatgctcggtacccggcccgatctggcctacctagttagagagtgcagtcagttcttggaaaacccaggtctgttgcattggagagctgcaaaacgtggattgcgctacctgaaagacacagcggactgggggatccagcttggtggcgtagcgtggtcagatcaaaagctggatggtcatctgagagcatacggatgatcgaaagtctgttgcaggctacgtgactcaattttgtgggagcatcatttcgtggagcagccagacggagaagcccgtcgcgctgcacacgaccgaggctcttattctactgatgcaggaggtggtgcacttgcgccaaatgctgaaggagctgcaggtgcagcaaattcagcaatcccaagtctttgtggacaatgaaagtacgaagaagcttgccagcaaccctgtatttcactcccggaccaagcacatcgatgtgcgccaccacttcgtgcgtgagcgcatcgatttgaaggaaattgacgtgcttcgggtgccaggagttgataacgtggccgatgcttttacaaagccattggcacgtccggcatttgaaaagcacagagctgcaatgggattattgccaagggcaagatttggagatgcaagttgatgggaatccgtaggtggggctgttgcggattatactgatccccactataccacttgcagttggagtaagacaaaaggtgaaagagaagaatctaggcctcagttgagaatatacacacgaccaacaaggtggcttttgccgcccagctgagtgttgtcgttgcttccatctctgcgtgagcagcaccaagaggacactccacttcaaattcaaagaatgttgtttggccgactgccgctatgctacagtagcatagcttggtccaaggtgcctccaactgacgcttgccatgccttatcctccccagcttcctgcaatggaaagggactacttcaagctgcgtaccggtatctttaatctagattacttccacccacatctagactacgggcttaaccgtgtgagcagggttgggcctcgagggcccccggactcacgctttcaacgagctactcatctctacatcgggggcgctgcaaatagtcgggccttgaccgcccatgtgcgagctcttccgtgacgagcatcagattgcgggccgcattctcgtcgcggtcccagtacatcctgcaggtgctgttggtatagtgcaggacgttctgggaccttgtcgcgcgaggatgtgctggcccgctacgtgcttcagactctgggggcggggttcctctgcttgggctggaggctcctcttctggctcggctcgtcgtcgcctcccaaactccgtctccgctagatcgctgtggcacgcgatgcatttcttgctcgtgaagtactcgtcgatcaggcgtacggtagcgcgtctggacagctccttcgcgatgcccttcagcgggggcactgcattgctgcggaggcctctcgggttgctgaactcgccgacaccgacgagcgtagagtcgtcgggaacaggaaccacgcgagctgccacgtatccgagggccgtgaacttgtacacgtagtttcggaatcgccaccgccgaaacgcgtgagtggagctgaagtcgatcaggaagttcacgtgtttccagaagtaggagatccacacccagtagtcttgcgtcgaggcgcatcggaaggagggcatgttcgcgagtagtgctgcgtacaccggctcccgtttcttcaggttctcgaaccagtactggcgctggttaaacccggccagatgtcggtactccttcgtcgatcatgacaccgacgtgacgtcatgcggttgtgcgcgtccgtgtggctgctcgggtcgctggtggcgccggaactctcgccaggtttccggtccgttcaacgcccgctgcttcagcttgagacggcgctgacgctttctacggcaccgcatccggagcctccacttggacgacgccgtattccgggtccgcttgatcttcctgaagcggtaaaaaacgtgggggtggaacgtcgcgtcagcctccgtacgccttgatgccgcagcacacatgttgcgtattccagggtcgtcgccgatgatacgcgttggctgatagtcccggggaagctgaggttgaaagtccaggcagcttgagagtggggggccttgtctggggttgaactcgcgagtgaggtggatgcacgcctcgtagccgttcgtcgagatgtggtgggcaaaccgccatcgccctgtttcgaacttgcgagcgttgaccacccacctccaggcttcggctttgactctggaaaactcgggcatcttggggtagcgtagaccgccgcgctccgatctgcgcatgaagcccttgagggggtccaggtcagggtgtcctcgcctttccaggtgttcgcgcagtcgatgccaggtatccagtagcacagtcgtcgatatggccatgtgacccggtacgaactccgtagtagggaaaacagccggatgctgcgccgtcgctcctccttatcgtcaatgtgggccgcgaatacttcagcatctcgtactgacgctcagtaggctttcttctcctcgatgtttttcgcagttggctgggttttcagaaattcgcggaggtgggcggcaacctctcgaatcggaccggaaaccccaccgacgaactcgtacgcctccttaaattgccagtacatctcgctgttcgaggcaatgttgaagcgaagcttgcagtatgacaccgtgcgcttgtagtactgctccttcataatgaccgtggcgttggtgagcatatcctcggccatggcgttttttgacgcgctccagtaagcgatacggggttgctcgtagcctgccgtctccgcacgagcactccggtactgcacgatggtacggtatagctccgggtcccagcgctcgtgtgttgcgctgaatcggtgtaggcctgctccagctagacatctagcgaagaactcccgcttgaatgccggtagagggagatcctcctcgatacaccgtagaaagtgtagattgcttagccgggacccctccatccggatctggtgcagcatacgcacgcttcgctcgatctcggcaacgaatgcagcgatggcggctttctcgccgtcgtcgggagggttcacgagcacggaaaccagcttgcacttgactgtcgtcacttcggggtcttcggacaggtgggtctcgctcagcaggaagcacacttcctcgtaggccgtcatgttggtccgttgtcgcttggtaggcatccgcctaggcccggactcgcccacggcgaaggtctgggctcgccgcttgcccagggcacgggtcatgggggggagttgtggcgtacgcggggcgatggaatcttgagtaggcacggaggcgcaaaatgtgaagtgggaacgacggaagcggtatttgcagaagcatcgcactcacagtatcgagggctacgcacccttgatatccagcccgtgcggagcaacaaagaggtacacgtaattattgcgctgctgcaatagtattcataagttgcttgccatccttatgcgttcgtcatccttgtcatccttgttcaccattctcatccccctccaatcatctacgggttgtcagctggtatagagagggtaatgggttgagtatccgcttgcgtgcgaagtcatttcttggtgcctttcccggaacgaccgaccctgcagcctttagaaggctcggcaccaccgccagtataagttgcggcaagggcccatccccgtgattcgttccgacgcggcagagcgcatagctgataggagatgccccgtcccccaagagattcatccggatccgtggtgtgctgctctcgcacccggacgcaacggctcttgtaccctgacgcaaccaggtcgtctgtcgagcgcccttactttgtcagctttcttcctctttgcaagcactcacgctttctacgacatgcgtgtacgtaatcggctgtgctgctcttgggcttggtcatcctttgtttcctgccaggtttatcatccttacctccagcattggccttaaccccaccctttaatcgtcatcctttccttgcgcgattcttgtggtccttccctcatgtcatcgttgtggtccgttgccacagttttccttcgcgtccgcctcctgtcatcctcctgctccgccagtctcagatgaccgcctctgtaatccttcatctccttttgtcatccttgttttctttatcccagcctaacgccacccattacgaggatcctcccccgctgataggtcatccccaggattggtcatccgtcgcttcctgtcgggcttatcatccctgccttcaaagtcggtctttcagtaactgtcatccttccctcgcgtcatcctgatcatccttcattcgcgtcatccttgtggttcttttccataggattcctttgcgtctaacagttatccttcctgcctatgcgtctccctcgaacctcggcatccgtctagctgtcatcctcctgtccctccagtttcaaattgcggcctctatcatcctgcagttccttccgtcatccttttgctatatcctagcctagcgttactcattcaagcctatcgtcacgctgtgcattcatcagtacgtgtgatcatccttcttgcctgtcgtgtttgccacccttgttccattcccgtcactcattagtaatgagttattaccgtcattcttctctgtttgggtcacgcttgccttcttctctgtcttcttcgccctggcacccgcctccgtcattcttatctagcgccagctgtgaccttcgacatcctctttctctaccttcctgccaccccttccctgacgcagggataccggtcagcctcccttcatgtcatacttgtctttcttttttatcgtcatattagctgggccttatcgcttaatcctccttatttccaagtcatccttaatcctcgaaaatcctgagttatccttctttcttagttctaggtcaccctttctactaaaatccttggaatctcactcatctattttcaaatcctcggtcatccttggtttaaaagaggtcatccttggtttaaaagaggccacccttttatttagagcccacaaatacactgtacttattctaagacacgcctaacgtactcgccctattaatttttaaagtccggacttttttttatagtgcaggcccagaagcttgaaattctcaaatatttaaaactttaatcttggagttttgtatggacgaaccgataggtaccggtatctcttgtggcgggcttctattcgggagggggcttatattcgggcgagtacgctactttgtgatcctcatgtttaagtcatcttcaagctgggcatgcattttgatatgtgcaaattccactcttctatttcccaccatacaaacgcccgttcataacgtccaagtttgcgcgtggtctctctcgtcaaaagtgcacgttcggctcggtccgtcactcgcagatcgacagcgcaggacgcaagcgacgcacgcagactccagactcctccagcaacaacgtagagtgccgctctactctcgctctacccccgctctaccatccgtctaacccccctactctgtagcatgaccaagaaggtgctgtgcatgaacccgggccccatcgagttcgagccgcgcgtgctcaagcctttcgccatgcagggcatctcccacgtggacaagacggtcatcgacgtgttcggccagtgcctcgagaagatgcgcaaggtcttcctggccccggatggccagccgctggtcgtggccggctcgggcacgctcggctgggacatggtgggcgccaacctcgtcaacaagggcgatgacgtgctcatcgtcaacaacggtgcgctcagctctcaacagctgcagaaagatacagaggagattgcaaatgctgacaatagaggttatgatactatgtgtgcaggctacttcggtgacaacctggccgactgcctggagcgctacggcgccaagaccacccacgtccgcggcaaggtgagacggacgcaatattactggtgctgtatgtagagggagagtgttcttctgactggtgactgctgtggtgactgagtgcagattggctcgcagccgtcggtggcggagctggagaaggcgctgcaggccggcgtgagcttcaagctggtgacgatcacccacgtggacacgtccacgggcgtgcgtgcccacgtgaaggagtttgcggctacaatccgtcgcatccagtctgacgcggtcattgttgtggacggtgtgtgcgccactggcggcgaggagacgcgcatgaagcagtgggacctcgatgtggtgctcacgggctcgcagaagtgcatcggcgtgcccgctggactgagtctgatggtcatccgaccgcgcgcgctgcagctcttcgagaagaacacgtccacggttaagtactacgtggactggcgcaactggctgccgatcatgaagaactacgaggcccgtcagccgagctacttcgccacgccgtcggtgaaccacctcttcgccctgaacgcggccctggacatcctgctcgagaacggaggcatggagcagcgcttcaaggagcacaagctcatcggtgacgccgtcaaggaggccatgaagtcgctgggctgcgcgctggtgaccgcggacgactgcggcgcgaacacgctgacctgcgtgcgctaccccgccggcgtgggcgcggccgacttcctgccgaaggtcgtgaagcgcggcgtctcgcttgctggcggcctgcacaaggccatcaagacggagtacttccgcatcggccacatgggcccgagcacgcggcgtctggaccacatcctgaagacggtggaggccatcgagtgcgcgttcatcgagtgcggccacaaggtggcgcagcccggcaaggcggccaaggacctgaagaagaagctgcaggcgatcatccctgtgcgtccggcgtgcggctacgcctcggtctaccacggctgccccgtgccgcccaagtgccaggtgtactcgatcggcacggtggtcatcgcgttcgctgccggtcttctcctctcgcagctgaagagcaagatctagacgaacactgggcagacaagagccgattgactgactgactgactgactgaaggtagttatgaagcgaggttgcatggatgaatggatttcgttgtttaaccactacagaactggagagataatggcggtgcacgtggagcacttcaagcatggatgatggcaagataccgccgaaaccaaagcttaagtgcgcacgtctatgtgagcttatcacctgtgtaaaccaattgacaaagccacgtgacgtgtgaacacttccgattcgtatgtctctcaaactcgttcagccgttacggactcagcgctacgtcgtcttcggcgtcaccactcgcaaactcgactcgtgtccgccgctggccatggacaagaaggatctgcagaacctcgtctgcggcggcagtacgtggcagtgcaataatgcgtctctatcatgctcttatagacatcgtgtttctgatctagagtttgatgtattaatctgcagtcgctggctgcgcgtcccgcacggcggtggctccgctggagcggctgaagatcctgctgcaggtgcaggactacatcaagaaggacggcgcggcagcgggcggctcctctccagtcaagtaccgcaccatcgggcagtctctgcggcagatccacgcggaggaagggctgcgtggcttcctgaagggcaacggcgccaactgcgtgcgtgtgttcccgtacgtagccatccagttcgccgccttcgagcgtctcaagccgctactgatctccgacggcgctgagacgctcagtccgttgcagaagctcttcggcggcgctgttgctggcgtcgtgtcggtctgcatcacgtacccgttggacgctgcgcgtgcccgcctgaccgtgcagggaggtctggccaacacggcgcacaccggcatcctcaacaccttgtcgactgtcgtgcgaaccgaaggactgcgcggtgtctaccgcggcgttctgcctactatttggggcatcgcgccctacgtaggactcaacttcaccgtgttcgagacgctccgtaatacggtgcctcgcaacgagaacggtgagccggatgccatgtatctgctggcatgcggagctctagctggagcttgcggccagaccgccgcgtaccccatggacatcctccgccgtcggttccagctgagtgccatgcgcggtgacgcgaccgagtacacgagtacgctgggaggtctgcgcacgattgtccgcgaggaaggcgtccgggggctgtacaagggcctcgccccgaatttcatcaaggtggtgccatcgatcgccatcatgttcactacgaatgagctgcttaataagcgcgtcatcaagaaatacgagctgtgaccaaggacgtctcgtggaaatagagcaaacgtgcgctttaaaatacgtacatgagtgtttaacagagccaagtggtcaacttagtggacaaccccctcgtcctcgacaaccagcgagaagctgacgacaccaggcatcgtgtagatgtcgatcgcgggggcagcaccgcccaccgcaatgacgtccgtagcgtggtccacgacgcaaaagtgacaggagggcagcgtcgatcgagcagccgcaaggagttgacccgagctgcggttccacttcttcaagctagcatcgttcccgacgctcagcagctccatgtggtggaagacgacgtcgtgaacatcgctcgtcgtctgcgtgtagtgcacaggcacacgggagggcagatgccacataccaagaaatcctccaggacgagatccgcctccaggagatcgtttactgccaccaccacatgccagccacatctcggactcatcgtgcgcaactgcgccaacccatagcgacggtgtcgaggacgactgagtcgccggctgaggccgaaggagctccactttcttctcctggcgcaaatcccagatgccgagcgttccgtcctccgaccccgtcaccagctcctgcgaatgctgcaggtggcgcacagcgtgcaagtagtcttcgtgtccctcaaaccggcgcgtgaactgctgcgtcgcgacgtcccactcgtgcgcgacgctgtctcctccagccaagaacaggtgccccgaggtcttgctcacagccacatcgttcacctcggaggccggcagcagagctcctcggaagcccagcgtccgccgcttcaagtggtccacatgcaccggttgcagcttcttggcgctcgccgggtgctccaccgccgctaggatgtccttccacctccacacccgaaagtcctggtctcctccactggcgataagtaaaaagtatcttgtcagtataggacgcaatgggctccacctgcccacaattgctgtacctaatcagcaacgggtccgtgtcatctccagcaaaacggagcgagtaaatctgcgtcggatgcgcctggaacgagagggttggtcccgggaaagcggtcgccctgcagcgcaatagaaggatacatcaacgtcttagtacagtactcaactttgaatgaaacggccagcgaggcgccttactcgccgcgccccacttggtcccagtgcgcgggcgtcatgactcggccgagctggtagacgtggagcagccccgagctcgtcgccgccacgagaacgttctggccgcccgagaccttctccggggcgaagaccgcctggtacacgatcgtctcgctcgcgcgcgtcttgcgcagcagctcggcgcggtacgcgccctcgtcgtacgccgccgggtccatcgcaacaactattcgattttgggtctggtatttagatcccatcgtaaatatttgggtccctatgaagtcgtttgggtatactgcttacccatttggtgtcgtgcgtcaccaagctcatcgcatggggaagcgatgcggttgagctgtgctgtataaatagtggctttccagtgagttttcaactcccgacaattaagtgaagaagaccagaaagcatgcaggccgcaggaatgggagcgtcgtccccgccgacgtcggccaggaagagcatgagccgcagcatgtcacgccgcggctcgcagatggacaacttcgcctcggaagtgccccaaaacgtacgcacctctcttaccatcggttgcaatcactattggtgtactagtacttgcagctcgctgacattggttggtgttgctattgctacgcttaggagtttggcggggtgctggtgacgcccgagcagatccgaatggcgttccagttcctggacgtcgagaagaagggccgcgtgacgctcgagaacctgcgctcgcgactgggcatcttcttcgacaacatgagtctcaaggacgtgcgtctgctgctgagcgaggaagcggagctcacggaggagtacctgaacgctctgctgctgccgaacgaggtcaagaacttcgacccggtggcggaggccttcaaggcctacgacccggaggagacgggcttcatctcgcgcgagatgctgcgctacgtattcgagcgtttgggctacggcgcgctgacggaggaagacctggacgtgcttatctcgtgcgcggacgctgaccgcgacggccgcatcaacctggcggactttcgagccatgcttgagtaaaaatacgcttccttcattctctctctctctctcttcttcttctctgcttcctacaacagctttgccgtcactctccgacacgagtgaactgctctgtactgccagacagacccacacttgacgtggtagatatacaagtccgctcgaccagtcagttcctctccttcgagagtgccgacgcgtccgtccgcagagaaatcctctctaatcctggccgtccctatcgttgtccccctgccttgatccttaatctgaccaatagataggggcttctgcagccgctgcgagtgtctatttcttcttctgctgctgcttgccgttcttgttgttcttgccgttggcgttggcgtcgccgccctccgccttcatggccgccttgcgcgcgatcttctcctgcagcgccttcgcgtcggcctcgcgcttggccagcgggttgccctggctggtgttcttggcgtgcttggcctgacgcgcctgcgcgcgctgtatcaatcgatcgatcaatgcacagaccacgcacaaccagtgagtttctaggagctattaaggaattaaggaagcaaaggccactgcaatgcagcctctatctgtcgggtacgtaccgcgcggtccacgtctcgctggttgccacgggtcatcgcgtcttcacctcgggtctgaagcttctcgaagaaattgtgaaatgaaccgaccgacggctcgccgtcgcggcggtaactcacatcgaccttataacgcacaagctttctcgacgaatctcgaagcaccttttttatagctcacaccggagtggatggattttatagattaggtcggtcctattcatgtcgcacggtctcgaaaaacgcattcgcaacggccgagcgatcagcaatgctgagcttcccaagtgcgacctcgggcggcagcaggcgacggcgtcgggccccgccaccgagcagaggagacgcctggcgtcgccgcatcccgtccgccttcgccccaatgtcgctggatctcaaccaccagcagcagctggttgcagcgcaggccccgtcggacccgagcgcgattgacacacagccgggagaagccccgacgttgtcaactgaagctccggcgccgcgcaagcgaacgagagtttccacggcattccgcctcatgaagttcccagactcggacgaagactcggagagcgactacgtgccgtcagaggaggagcagggagaagaacgagagagtgagggggaagaggaggaggcagacgacgccagtgccgaggagctgttcgtgagctaccagggctcgagcgagagcgaggaagtggagctggaggaggaggtggacctggacgaggacttgcgctggtggaagagcagcgaggacaagcgcaggtgggagaagaagtacagacaggcagattccgccttccgcaagaggttcggctgtgccattgacacgcccgcccagcccgagacaaggaggaggcttcgacgagagaagaacagacatcgagcgtacaagttcgtgctggctagcttggtggttgcgtacttggtgcagctcgcggtcgtgtactcggcgtcgtcgtgggcgttttcgatggtcgcgtggcgatcgtcggccgccgaggaaagtgacgacgctcaaatggacacaaagcacgatggaaacgttattgaggagacgccacctccggcagcgctaccgtcagagcagcaggtgccagagcatgtgcggactgggcttcacctctgcgcgacgctctctcgacgcgtgatcaagtctgagcatgatgtgacagccacacagcacgcgctgcgcgcctgcgatatcgcggtgaagtttgcgcccctcaagtcacgagagggcatcgaggcgcatgtgctgcgtggtgacctgcgcagcttactttcgcgttttgacggcgctgacgaagactataaagacgccctgacgttggtgttggaggttgaaagcagcagcatcgactcgaagctcgcaccagcgctatctcaagagctggacctcaagctcgtagccaaccggtggacgcaattgtataagtcaaagagctttaaggagctgcggcgagaggcgaaagctcgagcagcaaacgacaacgacgcgagcgcaatatgggaactggcggccgactggctgagggcgttcaaacaaaagaaacctgtgctggaagtgctcacactccagcgcagttggacactgcgtcgcctcaagtacgaagtcttggacgacgagagcaagacaaacctcgccgaggtctagcccgacaacagtgtgggtcgcttcgtattgttttctaatctattttgttcacactctgactacctagtcttcttcatcttcatcttcctcctcctcctcgtcttcatcttcctcttcctcctgttctacgtcctcactggcaccttccttctcctcttcgttcgctccctccttttcctctgtcgtctctacggatttcaggtcatcagcctttgccttgagctcgcgcactcgatccggctgctgatcatgctgctccaagtacgccgccaggtcttcaacaaagtcgcaggtgtcagggctaagctgaatcgccttttccaagcacttgaccacttccgcatcaaaggcgtcgtctccggcgcttccactcctcgccatacgcatgttggccatgttgtagtgcaggttggcattctccgggaactttttcgcggcgtcttcgaacaccttcacagccgcgtccagatctcccatttctccataggcctccgccaatgccgccagcgtcacgccgtacgccttcctgagctcgacagcctcctcctcctctgctgcttccagcgcctccgcgttgatcttcatcgatctcttgtaagccatcgtggcctcccgctgctgctccatcgctgcgtgtgccagtcccagtcggaaccagaccgacgcgtccttcttgccgtcctccagctcgctcgcctgcttgtagcacttgagcgcgtcatcgggctgcccagccgccgaatggacatctgcgaggtgcgtgagcgcccccaagtggccaggcttacacttggccgcctgctgaagcgccgcgagcgctccgtcgtacgactccagctgctcgaaggccaggccggccgagaacgcgtcgtcgaagcccagtgtgtcaatctccacctcggtctccttctccccagtggatttctccgtcttctgcttcttcttcgagcgcgaactttcggctgcagcactgtgcgtgccattagatgcagcggccaacacgtcgcgctgctggcgcttgagctgctgcttgagcttgttcttgcccatggtcgcgtagctctcttctgtagctcctcgcgtcgtgcaatggttgacacgcacggggatattgtcaccaatcacaacgccgaaatgcatattttcgtccaatcagctacagcatggaatctgataacggaggagaacccttgccagttcaacggagaccttgaggtgtatcaatcgatcaagccgttcctgctgcgtccgacgctgctgctggccatggcgtggcgctgcagtgctctatcgaacgacggactggtggacaacttggcgcgcgctgggatcgtgcagtcgcagcgcgtggctcgcgccatgaaggccacggaccgggcgcagtacgtggcgccggcgaccgagagcgacgtggacgcccctcgccccgtgtcccccgcccaggcataccaggacgcgcctcagcgactcggcttcgagcagaccatctcagcgcctcacatgcacgcgtacgccctggaactggccgatgtagccatccatgacattgaacacccgcgaatgctggacgtgggcgctggatcgggatatctgaccgcctgcctaggccacctcgtggaccaagacgggggccgcgtgtttggtatcgaacgcatcccgcaactcgcgcagttggcgcagaaaaatattgaaagagcggacggagacctggtgcgcaggggcgtcgtctcggtcgagcgtaagagttgagttgtctgggcgtttgatgagattttggtgacttaattttgtgttgttgtgttggtggaaggagccgatgggtggacgggtttgccgaaccaagcgccgttcaacttcatccacgtaggggctgctgcagtggagccaccgcgagcgctgatggagcagctcgcggaaggggggcggctggtggtgcctgtgggcgaacaaggcgagagtcaagtgctgctggagatccaaaggacggacaaagagaccttcacgaaacgtgagctgatgggagtgtcctacgtcccgcttgtgcgacagcgtacagagctctaacagctttcgtcgtggccgatcgaaaagtgtggggacgagatgaagggcgtaccattcattcagtgcatgctttctcgtaaagacaatcaaatgtgcttgtattttatcagaaaatgaggggaggagcatcatcgtcttcttcttcttcctcgagctcgccttcagggccgacagcgtgacttgcagtcgttttcgtcacaagcggtgtcatctgcagccttccacctggggcattgttttcgtcgtcattctccttcttgaccagtccgcggatattaactgcacggcgtttgtcggttggaaccttgttggcggcctccagcagctactcaagcacgttaaacaaatgagagggtgaataagtacgagccacacacattccacatgcactgctttcttacctcgtccgatatcttggactgtcgtgaggtggtcctggttgtcttgcttgcctgcttttggttagaggttttcttcttcttcagcttcttttcttgctcgtcgcgatacagctgcgcgcggagctgttgcgtcggagtgacatgcgcctttgggagcgtcaaacgcaacgtgcccgtgatcttagatcgctcagcctttcctgcgtcggaatgcacgagttcggggaacttgagccgcagaaccttattcttggccacgatggagacgtaggacgggtgaacgtccacatccaccagagacgtgtccaggaaccgaggcaaatccacttctagaatgatgtcgaggatctcgtccgtcagccggaattcccacttgccttcgttgcattggcgaatggatccgtcccctcgctcctccagcagccgagccttccgcagcgcctcctcgtgctccgcttcagtgttccgctccttcggctggttctcacgtcttcgtgcctcctcctcttccttctgctcggccatctccaaatacatctcgcgccgcgtgtgcggcgtgtacggcactttttcagtcgacgccatcacggaattcttcttctccttttccacttgctcttctgagatgtcgatggcttctcctcccaccacctcaatcacctcgtcctcctcctctgggctctccttcttccgctcgagctccttcttggtgcgcaccttctcggcctccctccgaacgtacctttgtctctctgaaaacacctgcagcgccttgatccggtcgctgcggtggatctctttgccgtccaggatctccagttggggcagcgacgcgatgacgtactccctgaagcccgtctcccagttggactgacacgggttgccgagcatgtagagctctcgcagatgctgcagcggcttcaggtggccgatgctctgctccagagtgtcgaagtccacgaagttgacggtcaggtccagtttgttgaggaactcgcagctctgcaggccctcgatcttgctgatgttgttgagcgccacgttgaggtaccgcagctccttcatgtgcgtcaggtcctcgatcttctcgatgatgttgttctgcaggtagaggatccgcagcttgcggcacaacgtgccgatcacctcgatcttctccagctcttcctggtgcagcgagatctcctccagcgtcgagacgattccctcattgtgctccgcccgcttgcgcagcagctccaccgtgatgcgaggcatgtctggttgctactcttgaaggctaaatggaaatgggtacaacaaagtatcttttggatcgcgtcctttcgaggaatatagggtttctattttccatttagacccgaaatggaaagcgaatcaaaaccaacaacgtttggtcaactgtatctggcgccagaacacccaatctccctgtttactgccatcatccgcagtagtagcctaccgtaaaatttgccaccacgtttcaacaagattcgtaatggtcgacttgaccgcttcgaattttgtctgtgcggctcgccgcgaaggttgccccgataagcgccgattcgcacattggttccgtgagggaaccaaaacggctcgctgacggttcagcccggcgcaatgccacgcgcgtcgttggatagcacggcataattttgtccttgggttgaagctgcagagcgcggcaagtaatttttagcatcctgaaatgacccaagtttcttaattaacagcggtagaatcgtagtaccgtagaaccggtattttaatactagtagtggagcatctcagtcgcgttggtccgttgagttgcttagggggccgacaccctgcagtggaatctccactgcaggccgacgtccccgctctccaaatgaatctaatgaacctgtcggccattggggtctactaagtaagcaccacgtctagaaatatccagttcagacgaccacatcaatttacaattagaaacactgttaggcctgcataaagacgtctgatgtaagtaaaaactacatcatgagctccacatactgggggttgaatccccagacccccgcaatacaaaacgaacttcgcgttgaggcaacgggtccgttcgctggaatgctcgtcgctgggcccgcctccgcaaataccgcgcggccctgcttcgcgggcagcccgcgcgggtttgctgcggctacgctcctcacaaccgctcactaccgcttttagtgctggctgcacccgagcaggtcaatggtgctctgcttggtaagcacgtagttgaaccgagagtctgtctattcatttttttaaataccgtatttcgcgtgtagagcttgcgaaatacaccccattctaagccaatcagtaatcaaaatgctgaagcatgcgactcgcatggtgagagatacatgtcattacatcagaatactagcatatatttttcaaaattatgaccagagcgaatggctcatagccggcgcggagggcattggtgtggcgcggcggtgctggcgccgtgtccagcagtactatttgcatattgagtccggtgcggaaaacactatgaactgaatcctaccgaagagagcgcacccgcctcctatactggatacggataaatatcgtgacggtgccgacacaattgttttacttgatttaagtatagggaaactgaccgcaatgcatgtatattgaccaatgacatctagatatatccaatatcgaccaatgagcttgattaggtgtagggtaaaacgatgccgacgccgtgccgacgtataatgtaggcacgggggcgaaaatatgcagggcgtcaatacgagccaccagtctactgctcatcactcgaatatctgccctcttgccgacagaacactcggaaccagtatgagcctccaagacctcgcccccgtcaactcccagcgcgctctacaaaccgcaatcaacgccttcggacgcttcgtcgcggcccaaggcgtctccatggacttcatcgctgcctctctcgcagatgatgagagtggggctgtgtttgtgaagctcatgggccgctttggcgttcacctcgccttcgtcgaaggccgaggagggaagccgctggtcaagaactcggtcatgagctactaccgccatgtaaagaactggctgctcgacacctacccgacccaccgagccaccatcgagaagaaactactcaagatgggacagacgctcgagcgccattgtctgaagcgcatcgaaggtggaatggtcaagaaggcgcctgctgcacgaaggaagacctacgaattctcatggacggactctactatgatgccaccagccccaaggactaccaagatgccgcgttactggcgctgatgtggtacgcgtttggccacgcctcagacctggggttcgtggcgaagggaaacctgtctgtgagtgcggatggcgttgtgttcgttcggctcatccgcgtgaagacttcagacgagcagggcatctctctctttcccgacaagaacagcttcatcacgtgccccctgcatgcgattgcgatggccctggtgatgcaggacgctccgtgcgcacagctgctggatcacccgcaccttgccgcaagcggcgacgagagtatgacagcccctgttgacgtgccactagctgaagctcttgttgcctgtgagaacgacgacacgccaagtgagctgcctcagaaaaagcgtaaactgcctgaagaaaacatgaagatccacgcctacgtgaaccgcgttgtcaagacagcgtctgccgctcaagctaaagcggtgccaactgcaaacttgacgtctcactcgtttcgacgtggtggggctcagcatgcaaacggtgatccactgctcagtgctcagtggattttcgatcgtggttcgtggaacatgacggctaccaacaaggctttcgcttacgtgttcaacacaaccagcaaagaccagaaagtagcacgtgttctcagcggttgggactcgagcaagaagccaccggttccaaccctctcctggttcgactccgccagccggcagcaggcactgagcttgggaaatcttcttttccagccaagcgtgtgcacccaagaccccgagaagaagctcaacgcccgcgtcgctgaagttctaactgccgcgctgatccagcattttcccgaggtactcgagcgctacccgatgtgcccgtacgctactcggatgcgcgaatgcctgatggcgttgggtttaccaaaagctccagttctcgcgtggagctctgaactacaggcgaaggtggcacaaaaggatctggaggaatctcaagacgacgcgggggcattcacaagagaagaaaagctgatcaatcaccagaactgcatcatcggcgagctgatagccatgaatcgagccttgaccgagcgggtcacccaactggtgagtcagcgcgacgatggtcagggtgactcctccacaagtttgccggcaccggtggtggcaccacaatcgcattgcgaggattccgctactgtatcgaagtcgcgtggaagcaaggctctcccgaaaggcccagcggctatttggtttgagtggtacgcaaaaacaccacgtatgtgggacgtgtgtgcggatcggcagaaaaaatcagcgtacaagcataccgtgaactacatgaagctcttcttaccaaacggcttcgcgctggacccgtcggcctctgactacaccgaccaagttgttcgtaccggaattgagaccgaagccgggatgtacagatttttcgaagcgcacggagtcaagagcaaacgtggatcagctgtactgaagcaactgcgcaagtttttccggaaagcaagctcaattctctagtagacgcgtaccgtgctcgcgttgctgtcgctggcgtaacggacccagcgcccaaggaaacgcaagagctgtttaaacggaagtagttgagttttagtttctaacgtggggctataataaatgttctgcaccgctacacattacacttcgataaatgtatagcgtacagcatgtagtgcgggtttgactttcgtacgcaactgctggaacgccacagagcttcataatatcgatctactcttaatctgttcatgcatttgacaacatcttcaactgcagccgaggcggtgtgctaccactctgaatctttactgtagccattttgttagtaaaaaataagagtgttcctgtcttaaaggatattttatgattacccagaggttgcagattaaacaacggttttgtgtaaaagtaggattttattgttggtagttaatcggctcgaccgcgtaaacacagcccagatcagcaaagaagtggcgtaacccgtcttcggtacttggcttgtagacgagctcgtccgagtcgatgaagtagtgcttgttgcccaccgccgcgcgagcgatgcagtgccaggtatcctcttcttggccaaagggcctaccgatgatcacaaggtgcctaaaactagacctaggaatcttcttgaaccacctttgcgaactgcagttgaacgtgttggtactgttcaggtatagcagctgatagcccttggcgcgaagcgcttcatgcagtgcttgcatagaatacgccccgtacttctcatcgccatggggggttggcccttcttcctcgggtgcagccgcgttaagacgacgcacgattggcaccaaatcctcgacggttaaaaaaaaccgggtttgcaccgcattgttgatcgagtacaatccacagagagaatatctctcggatgtaccgctctgattctcacacattggaccgcccctagtccgtctacccacaatggattgcatctctgttcgtggaaggtctagcaaatcgccggacgtgaagagagatgcgcaccaaaaaaaaactccccactcttacttagcactgacgtgaaatcgctagcaaatcgccggcggggtgagcgcaaaagcaaaagtgagaaggactgcatcgctgcaacgaaggcgacgagcgctaaccaaccgtgtaaatttcaatgcttttaatacagtacagccagatgaactctcgaaaaatgagaaatgtattgcgtttttgtatgttacgcagcgctaatgctgatgttttaataaccaacatgcaaacgcttaagttggtaatagcggcagaattgcaggtgtcaggctgttactgcctgacacctgcaatccaggatttgctctgacactgctggagcagtggcgcatttgattgctaaccacctgggcaccatgcccgatgtgcatgatgtgtctgctttttttagccaatcccagcttatagacactatgtcggccgatgtcggcaccgtcatggtatggatgaatttacgaccgatagaacctgaggattgttatcgagtcacaaaaaacgaaatattatccaatcgtaccgcagaaatatcttttggcgaataggatttgttggggttaggtctccggttccgacacattgcgacaaatatttgtcggaatctgcgcaaaaaaatggatatgccactacgaatacattgtataagacgcatgttatgcatattttccatatgtcatacagctaggccctaatttaggacacacggcgataggaagccaaaacccaggccacacagattaaactacgaggacaagcagatgagtatgtatgcttttgtccctacgaacttgaaactacttcgctgagatcgagcctctattgctgactgaataccagtttcaagatatttgttgcagttacggccatccgtcaactttcgactttactattaataagtattcgacctgtgtattctcccaaagcgagcgctcggggtcgccggtgcttggccccggtaaacaacgtgtaactttccaaaaccggtaacccaagtgggtaccgcagttttatttctaatgtaatccttttatatattaaaatataatcaaaaaatgggtatccgttgataaatgctatgacttatgccaacgcagcttatatatcgccttcaggtgtagtgagaagatacagaatgagacgacgctgcctgtgatagccttctagtggctgggagagcactagcgcatgggacgatacgctgcgggcgtcgatggtgcggggtggtgtagagcagcttcctctggccaaccaccaaaagcctcttaagtcctactccaatacgccattttggtgtacttatcgctatcttgtgctttttgtcgtctcacgttcatatcgccgccaccactgtctccactaggcagtggccacgttgcttagccttatcctgcactgccaccgtgcagatcgcagcgacggctttgttgttgccgacgcggcgatgaaaggcatcactaccttcttgtcctctggctgcacgcagaccaaggaatcgggtttgaggagaagcgcaattctcagaaatgagtgatggcatgtgattgggtgaatgatggatctggactcagatagatctggatccagactcatctgatctgaacccatgagacccaagatccaagatgggctcaccccggcgtcattggggatccaccctccgttagtcggtgccgctgttggcaagttggatgggcgatctcgcagattttgctgaatccgctacatcacaggtcggtttgaaacattaactccaacctcaattcgcaaaattcgttcaagcgcttgagcgtcccgcagccaatcttcgagttcatcaaggcgcccaagcttaccgtgtagagccaaccagccttggctcggttcctgcgtgatcgccgtcggtacttaaacaaggtccgagagagatgcatagtcacgggcgaagatcaagacaatgtggctttcagcgtcaagcgttcagtcgaacctcggatccttgatcatcaggcccacaattgaggtattggaaagtggcagtttccaacgctgttgacccgccagcccgacaatcaagctcaatcaaggggcaatcaaggcaaggtcaagcgagagacggagatgactgcttctgattgcatgatgacattatcctcgctagagtgaaaatcagtggccgaagcctcgttgggcctaatacaaccccgaacgaggcttcacggtacccacgtttaggtacagttgcatttagttacgtacttcggccgcacttattagtgtagccgcggtcgtcatttgatgtgtccggaatcgccttatcgcgatcgcttacactagatatttgtatatggacagaggactcatcataggatgatcagaacgaggctcccagggcctcataaaactcagtaataaaacgacagtcttcccccaaagccaacaagggtcaagtccgacttcagtaagtgtagctagcttattgtagtgcgtgtggatgtctgtcggggagcttatcgtgcattgaccgagagtttccttggcagcgccaagagttggcgcggccggagaggcaggaacggtatcgttcggtatataacgttatttgtgggattaggtgtctgtaacagggttacacgcacaagtggctacagtcacttgtaactctaacagacacgacgtctgttagaggttcgaaagactttctcttggattggcgcggccggagaggcaggaacggtatcgttcggtatataacgttatttgtgggattaggtgtctgtaacagggttacacgcacaagtggctacagtcacttgtaactctaacagacacgacgtctgttagaggttcgaaagactttctcgatcttggtgtagacacaccaaaggctacatacatttacgatcaccacgacgggtggtccatagagacttaggattcctattggctgaaagcagcatcttttagccaatgagcgacatgcatagcactggaattctgccaaccagccgttggcagcttcccagtttagaatattacatttagaggaagtcagaaacataaaacaaaaatagcagttctcattttaacccaaaaaacattatttggatcgtttatttagattaatctatactcggaggcccgagtataattaactctaatttaaaccaagctacgcttcctcgtacacgtgcgcacacgtgtaagctaaagtagtgagccaaagtaggcccataacacctggtagcactttgtagtccgtccaacgactgactacccaagttagtacgtcaccgcacgaacgcggagctgagaaccttcccgtggatacagaggtgcccatggaaagctccactacgcctgcaactcacgttgcacgcgctgactgtccccacctgtcggacccagagtgggaagctctccaacgactgtcaacagtcattggtgaggcggctgtagttacgatgctgcgtacgctaacgtcgacagagcaacacggtgttgctctgggtttcatactgaaggagcaacgcgatgttgctgctactaccgctgtgtcgtccgggacgacaccacgcgcgcaaccgctgaagctcaatgtgagcaactatgtcggaagagagggtgaacctctcctccgttggcttgtcgaacgcgacacagccattgcggctcgacgtatcgtcgacccgttgtcgaaggttgcgttcgccatgtcatgtcttggcggacgcgcaagaagttgggcgtatggacgccgactctcggatcctacgtgctttagcacgtacgagggtttcaaggaggagctcagacgagcgtttgagcccccacaaaacgagttccggtcgagggcggagttcctcggcctgcagcagggcaagcatgatgtccatgcttacgctcagagagcacggtacttggtctcgaacatcgtgaccaatccgatcgacgaggcgaccaaggtcgtcacgttcatgaaggggctgagagatgggcctgtgaagacctatctcttccgtgagtacccgagtactctagaagctgcaattactcttgtaatgcaggaggtgtttagcctgcggcaggctaagctgcatgcacatgtgccgaggccacagccacgcccggtggtgaggacgggaggcccagaatccatggacctctcgagtgctgcaactgccggaccccagcagtcgcagggaaataatgtgcgacgctaccgttgcggtagagtcggtcactttgctcggaagtgcacagcccccgtgcaccagcagggtggctatcgcggcggtgccgggcaccgtcgcaaccaaacataaaacgctagacgctagtaggcgcggggcgccctactggtaatgcagttccgcgtgtcgaccttggacacgcgacattgaggactgcagcccccagtgagattcattctcactgcaagaaccaagataacaagcctgaccttgtcatcctgaatgtgaactcgatgagagcaaacggctctctccgtgctttggtagattctggcgtgtcgaagaactttgttcgactgcgaagtctatcaaggcttgacttcgaggatttaaagatacctcgaagtatgttggaagtacgactggcaacgggtgccatcgtaaagaccgagaagcgcatggtacgcgtgcgcttcacgtatgaagatcaagagtttgtcgagccctttatcgtcctggatctggacgataagtttgacattgtatcgggcatgtcgtggcttgcacggcatgatccggtcatcgattgggagaagcgcactctcgtgcgctttggtcgcgacagcggaacagtgagcgatggccctgttgccactacgcacgcaccgacaggtgcgcgactccccactcgagacagcgcttaatgacgctgtcccggagcgccctgggcgcgcgcgagcacgcactcaagagcagctagcgtcggcgttgccgccgacagctaatgaaggaaatgtgttgacctcggaggtcgacacccgcttttcagcgaatcaggaagagtctccggcctcaaggggcacggatgacgcaggcgagtcacacgcctcagccgtggaggctgacgcgaatctgattggatcaggtctggccaataataagagccaaggtgacgtaacgccgtcgactccgggagtcgatggcttgggtgaatttgattcgtcggctcggggagccgacgcaacctccgtaatggagggctccgctaataacaggcgtcgaggtaagaatggcgtgtcgactctgggtgtcgacgctgcaagcggtgcggacggttgcaaacgtcccgcaccggaaaaacttgcatgctgtcgtgcggccgggctgcacgacgaagcgccgggcgaccgagccgggcttgaagtcgctcgcccgcgggatgaacccgccgtcggtactgaagaagaacacccgtccacggctgggcctggacgaagtcaagagtcatgcggagccgggatccgcaggacaagaagacggcgcatgcgaaggtcgctgcgcaagcctcggcctggggccgagacgctacaagaaatgtctgccgggcagacggaggctgagaagccggacgtcgagacgttgaacgtcttgacgcgtacctgtgccgggttccggtacagggagatgcctctcgctaatcctctgacgcaagcgtcggagttgacttcacttccagtcatgagctggaagcgcttcgcgcgtgacttgcacgatggacgcatcgagcaaatatgcattctctcggacgccgagaaaacgaagagcgagaatgaagaactgaggcagttcttcatggagagcaccactgagagcgaggacactctcagtgcgaagacgaagaaggagcgctttgaggagcagagctgggactcgttgaagacgagtccctactacgagatcttacgggagtacgcggacgtacttccggaagagatccctgcggatcttccgcagggcaagggcatccagcacgagattgatctcgtgccggggacgaagtactgtgtcacccggcagaggccactgccgcgagagcaggtcaaagcgatcgacgacttcttcgaaagtcgtcgcaaagctggacaagtgcgggaatcgaagtccccgcacagtgctccgacgttctgtgtcaagaagccacagggcggctggcgcatcgttcatgcgtacaacaagttgaacgatgcgacgataccggcgcagacgccgatacctcgaaaagatgtcatcatcgattcgatggccaggagcattatctacagcgctcttgatctgcgcgatgggttctatcagatcctcatgcgtgagagcgatatcactcactctcacgaccgtgagcccgccgagcggcatgctctgggagtggctagtgatgccgcagggtctgaagaacgcccctgcgaccttcaacaggtgcgtgacgcacttgttgcgctcggtgcgcgacttcgcaccgagctacttcgacgatgtgttcgtccacatccgggctgcggacgggatgagcgatgttgagatgcacaaggtgcatctccggaagctgcttgcgctcatgcgcaagcacaagctctatgcaaacctgaagaagtgcatcttcggggcgagcgagatacccgtgctcgggtgtctcgttgggaagaacggtgtccgccctgaccctgagaaggtcagagtgatcaatgagtggccgacgccgtcgaacgtcaaggaactgcggcagttccttggcttgaccacgtacttgttcaagtacgtgaaggactacgcgggcatgatacgcccgctgtcacagctcctgaagaaggacgccgagtgggtttggactgctgagtgtcagcagaccttcgatgcagtcaagcggggcttgactgagtcgccgatcttggcggtggccgaccaagatcgcccgttccacgttgtgtgtgacgcatccgacttcgcaatcggatgtgcgttgatgcagcacgatcacgagggtcgtgatcgtgtcgtctactaccaatcgcgtcagctgaagccggctgagcgcaactacccggtgcatgacaaggaactccttgccatgaagtacgcactcgcgaagttccgagtgtatctactcggaagcaaaccgttcgtggtctatacggaccacgcgtcgctgcggatggctgtgaagtcaccgcacatctcgcaacggatagcgagatggctctcattcttcgcagagtataacttccgggttgagtacaaacccggaagactcaatgtggtggccgacgcgctctcgcgtcgacctgactacgccacgactgatgccgacgtcaatgccattgacgccatgcgatcgagcaccccaacgtcgtcactgttggacgacgtgaaggtcgcgtaggcacacgacgcggacgcgaagctcttgctggcctatggctcagcgccctctggcaaagctcgtcagaagctgccgaagcatcttcgtgctcgtgcacaccgttatcgggtgcacgacgggttattactctacagtgcagtcgacgacaacgcggagcgctttgtcgtgcccaatgaccatgacctgcgactcaggatcatgtatgagtatcacgatgcaccgacggcggggcatccgggccgtgagaagacataccttcttctcacgcgagacttctactgggcccaccagtataaatgggtgcgcaagtacgtccgtgcttgcgaggtttgtcaacgtgtgaagcctgcgcctttcgcgcaggttcccttgcagtcactaccaactccacgggagtgttggcagtccatgtctttggacttcgtgttcggtcttcccccggaccgccaggggaacacgggcgttgtggtctttgttaaccgcttcagcaagatggtacatcttgctgcagtacccgctgaagtgactgcgaaacagacggcgcgtctgttcgttgacatggtgttcaaacaccatggcatgccgatcgacattgtgtcggatcgagaccagcgcttcactgcacacctttggcaagaagtgtttacacttcttgggagtcaactttcgatgtcgactgcggaccatccgcagacggacgggcagaccgagcgcgtgaaccgcgtgctcgtagacgtgcttaagagctacgctcactcgttccaacactggagcgagtgcctgccgatggcggagttcgccatcaacaactcggtgcatgcctcgaccgggcatacaccgttctacatgaacgccatcaggcacccacgcctcccgagtctcctcgggatggtgtctccttccttaagtgggggaggatctccgacagcaacgcagcagccgcagaatgccgctgacacttgcacagtgtcagccgcaacgacacgaagtaaagccacgaaccgcgcgtctgtgcaggacacagacgccgacaagcgcacgaagaacgtgtctgtgcggggcacatacactgacaagaagaagaagaagaagaagaagaacgggtctgtgtagggcccagacaccacgaagacgaacgcagaggccgggcctactgctggaaacgagctgaacgagttcggctcggacgtaatcaacttcgtgcagcgcagacaagccgtcattcggtttgtccaagacgctattgcagcttcggtcgaccgacagaagctgaacgcagacaatgttggtaggggcaacactaatgaattcaacaaggattcattggttttgctagctactcaaaacctgcctaaacatgcagtttccgacttcggggctcgttccgtgcttcatcgggccgttcacggtgttggtacggcatggcaacgcctacacgctagatattccatctagcatgcgcctccatccgaccttttacgtcgggcggctgaagccataccggcagcacgagccacctagctcggctggcccgaagcggaagccccagcgggagcgaacctctgctcaagcgcgtgaacgcgctggtccaagcgcgcgacacgacccccacgtcgacagagatgtccgacgcggtctgcgagccctgagcgacttgagccctcaggatcgccacctcctgcttcagagcggcgaactcccggctctgatgctgttccacagcagcgacccgctcctcgagcgtcgggccaaggtcaaccccaggttgaccatacccggggcgtgttcccaccaccgccgcctccgatccgcgacgcccgcggctcaacacgctggattgttgatcgtattgtgaaccatagtatcccgaaaacgaaccggcagccggttcgttatcgtattcgttggagagggtttccgccccatcaagatgcatgggagccacgggacgtcctgctgtaggacgttccggaaatggtgagggcgtacgaagctcatcacgcactgccgacgcgtaggtagtgcgagcgctgtagtcacctacagcgcccgaagtcccacgatcgtcgcgttcctcacttgccaggaacttggcacggagatctttgagactggcaggtacacgaatcgtcgtgtacccgtttaggccgcggtcgctcaagcgcaccgcacccggaagacacaacgtgcactgttggccttcgggcacagcgcatggaataccagcgtccacagaggatctgtggagctgctccaacctcccgcgcgtcgagaatgtctcgaagcgttcacgggcatgcttaacccgctcgcggtaagcagccggtttcttgaaattctcaacaaaagcataccaactttgacaaagtgcctgccagtcaggcactttgctgcgagaagaggtcttcttgctggagaagtatcggagttcgtgaaagagtccgatatagtaatcgcgcctttgattcgttaacggatcaaagtgctgctcctccgccacatcatcgtcgtggatgccgctgcatacgtacagcgggatttcatttggaggcacggtgttgcccacacggtctgcgacctctgacgcagccggcatccacggatcgcgcgctgcctgagcagcacgcggagaacttgaagacgccacttcacgcgggagcttaaagtcccagcagtagagagcggagtgtcgctctcgccgcgcgaaggcttcgagctcgaagcgtccgagtcgtctccttcacgagggcgtctcgacccggcatgcgggtcgagactatcgctgtcgatagactccttgcacttgctagaagaggcctcgccctcttccatctccacgtcgccgtcctcgaagtcaacggtgtcgttgactacagaggaaccttcgaggacaatctccggttgagttgtccccgcctcagccttggcagcaaaagcggaacgctttgctttgtgaccccgtggacgtctttcttcgccgaatgagggaatattcgcccgagaccagctcggctacgacctcaacggagacagggacaaaaacctgcgcaccgaccccagctgaattaactataccgcctgcaacaacgacagcggccatgggccatggcccatggccgccacgttgacgaccccacgtaccctcgagcctctgcatatgccctcggcagcgggagaactgctctctaggcccgggacggcgccggatgcgacctcggtttcctgcacagtgactgcaaccttgacagacctgctggacacgggtccactagctaacctagcggcggcaagcaccgagaacccgccgtgtgcgcccgtgtatgcggacgaccgagacgaaccgatgcagctcttgccggccgactcgacggcctcgcgcagcacggatgaggagatggtgcccgtgccgacgtgcatcgcgagggtgcccgagcctgcaacaacgacgacttcgacggatagcaacctggagagacctgatgacttactgtggacattatactttgacggagcgtgccgccaccggtccacggcgattggagccgcccccggtgctggtgccacgctgtttgccggcacagtgaataagtggacttttgctcgctacctggatagcacgacgcacactaacaacacggcagaatacatcgcgctcatatcaggactgactggggccttgcatcacggtgtccgccgtctcacggtgaaaggtgatagcacactcatactggagcaggtacgcggacgctacgcttgcaacaacgcgcgcctacggcagctgcgcaaccaggcgcgtcgcctcctacgccgccttgactactatgagctggtacatgtagatcgactagagaaccgagacgccgacagactggcgaaccgagctctcgatggcaggcgcactcggacagagtgcgctacgcacggaatggacggcgatggctacagggggcgcttaacttccgaccgactagcttcaggatcgcgagcaggacgtgacgctgagcctcgtgagcaccccgtcgatgtggagatggagaatgccgacgatgaagcggcggctactgctgctgctgacatcgtccgccgcgatcgaggacaaacgtttccagtgctgccagtcaccgcttacagcacgccgagccgccagccaaggttgaaactgcggaacaacttgactgagcgtgaactcgaggaagcacatgcagcggtacagcgactcggccacgagttcgcggacaagctcaccgtgtggtccatagagacttaggattcctattagctgaaagcagcatatcttagccaatgggcgacatgcaatgcactggaattctgcctaccagcccttggcagattcctatcttagaatattacatttagaggaagtcagaaacataaaacaaaaatagcagttctcattttaacccaaaaacattatttggatcgtttatttagattaatctatactcggaggcccgagtataattaactctaatttaaactaagctacccttcctcacatacacatgcacaaacgtgtaagctaaagtagtgagccaaagtaggcccattacagtgtccctcagtgtattagtctacctaccgagggtttaccttggtccccctgtataaggcctaacacgccggtacccttcctttctgagggactgcagtggggttgcgcgaaagcgctatatagtatcctagccttagctcgtggctagtggtacagggttttgggttgaccgaagataacctaagttgcacagaggcgcttgcaaccgacccggtgtaagggatcgttcctggtcttcaggttttgatccaataagcgcttacctctgcgggttagcgtgttgttggtgtctctaataccttttggtggaagataattttagtggtattaccacatcacacaatgttatacgggaaccagtcgcggatgtgacggaggagacactgaaggccgagatggaacataaagcaggcggtttgatgaacgatcatatgtcagacatggcaaggcccctcgctgaggagctgaggatggacttgtggcagccctacattgaggcctgcgtattcatggatctcgataggcttgttgaggggcacgatcgggcggtatgggtggggcgagcggtagcctctgacggtgctggtcgccagcgaatgaaaactgggtgcaagctgttggcagcgaacctgctgcccgacgtcctgcgagttgatgttgaacggctggtggatatggcttatcgtgaggcgaaggtgaacgacgtctatctgcacggccagattgcgacgcgtacggttcgtcagctgcattaacactttatgcagtcagaaactatgaaaactgttcagcccaaggtaaagcccggtgaagcgaatccggcaaaaggaaaaccgactgagacgccaatgctctacgagaggcccaaggcgaaagaccatgcggtgaggacgagacagaatctagagtccgaaaactctctagttgtattttttgtttagatgagtactctcactgcctaccttcaaactcatacaactcgtcagcgctcatcgattcagctccaagttgaaaacgatgctccgaacgcacttatttatcgatatccatgccagccattgcgtttaaaagctcattctcgcggctcagcgcgtcttgctaaaggcgagccaggcaattccgtatcgacggtgaatgtttaggatttcaagctcgtccttgtgcatgttcacgtagccgctgatgtggtcgaccttgatatggcagtaatgacacacgatgtggaagtctccacgaattcactgcttgttgcagaaagagcagatcaagtagggggccgacttcctcgtagtcacgcccgcgaaactggtcgtgacgaagttgccttggggtgggtgaattgacggggtaagatcgatatcattcagttagatgatcttacggagtgcttgaagctcaacatcgacgtttacacaaaagatgtggagtcgggcgaagttgaatgcattcgcaaatctgagaagggttatgcaactctcagcactctatctcacagcaaccacgcgatatgtatcaaaaatattggtatgtttctcggtaaatatcagtgtcctcagtatggaatggtatttccgacggctactaagcttaaggatcataaaaagaatagatgcgaggaggtgaatattatgtcgtttcccaagcaaaccacgatctactagcctgcgaaattttttgtattccagatgatgcagagatattaagttcacggggctactccttatttataacgatcgcttcatcgtttaccactttgaatctatcttgaagccaactcacatgcagtcaggggagaatactgtcttcatgaataaacatattcctgtcagtgtttcaattcttaatacattgtataattcgtatttgtgtatcgtagaagagtcaccaaagaggcgtgttgagaggatgttccggctggtactccactcagtgagtattttaaccttaacggactcagaaaatcataccagattttggggggaagccaaaaccaactttgctaaatactgcggaaggcacattggcattgcttttacatgttctttagtacaaactattcaacatggacgctactgtttccttgcttgaaaacgcgcgaacgcagaatccaaaacaataaccgcttgcattagacttgatcgacaaaattttgatgatttgtctcgggttgttttgaaataagtagatcacccaaaaggacacggatgatgtctacggaatcaagggtgcgccaatgcacaatgtgcttggtttcattgacgggaccaagaaccggatcagccgcccgtccccgaggcccgggcaccgcgaaaacttgcagaagcaggtgtactcggggcacaagcgagtacactgcctgaactaccagtcgtccccgatggactgaccatccacttttgggggccatcgagggcaagcagcacgacatcacactactaagggaaagcaagcttacagagtatttggaggctagagagtccgactttggtggcttcttgctgtacggcgatcccgcatacggggtacagcgcttcatcgtatcaggctttaagaaagcgcaattgacagctagagagcaagccttaacgcagctatgagatccgttcgcgaatccgtcgggtggaagttttctattctcaagacacagtgggcatctattgactactagaagaagcttaaactgcgccagagcccaattggtaagctagtaaatgtgtgcatgttgctcacaaattgccactgctgctattacggtgggaaccagatcagcaagtattttcatttgaagccgccatcgctagcggattatctagatctaagtagctagctactaagcgaccaatacaaactacttgttttggggcttactaaagtgtttttccgaatacttcagctagtttcaaaaagaaagcccagtcttcttcgcgctcacgagcacgtgtagcggcttgttgctcccgacgctccttctgctccttggcctccatcctcttcagttccaacaggaactccttcatctcgtcctctttgttctttttcttaggaggctcgccggctgacaggctctccatagctaggcggcgagccgttagtgatgcctcctcatctgcatcgcgcttgcgcttggcggtgtccttctcggcagccacggcttcgatatggtcatcgatgagagcaataagatcgtccagcaagacgtccttctccgtttcttcttcgtcgacgccagacgcagctaacgcagcagcattctgctgacgtttctgcgtcaccagcttgtcgaaacgcgcttgagccgtcttgccgctcagcttgccacgagagaagtttgcatcacttaccagctgggcggcaagagcgccccatgcggccattgtcttgcctcgctcctttagaaaagggcgattgctcagcgcctggcgaagaagtgcgaggtcctcctccgcggagaaattgcgccgcttcgggcccatggttgttagctggctgatctcgttgtgaggacagttttcttcaaagccaccaattctgtaactctaattctcttccgagggctggtggagcccgttttttgttgctttgtgcgggaatggtaatagaatcgctgctgcgaaatatctctattagtgagcaagagcttacctacaaccgattaactagtgaggttggggattacaccaccgcttaatttataaatttattttatcttatacctatctgtatatgaccaacatgtcgactgagttaggtttcggaaagtatattaattcttcgattgaagaagtatacaaaatgatcctggctattgtcgctggctaaagaaccagcataacttactaaatgaagctatgctgaaatttcttcaatcaaagttaacagatgccctggtgatggtgattatgttataaattttggtatgtacatgaacagaaaactcaaaaccgttcatgcgcttgatcctaattatactgactggcttcgtaaaaataaaggttaccgagacgtgtccacgtctagtacaagaacttagaacatctccaccgctgctgagtaaaactaaaagcaaattgccctcagatccgtgcctacatcggcacaaccgtgctaaagacagcggtcattgagactcgctcgcggtattcggggatagagagagtctctatcccggcggaggccttcccccctgctgcaatgtcggtcttcttcggcgagctcattgcggaatgagctcgagtattctttctcccaacgtggagaattgacgaatggtcaatttccggattgacgtgccgtgactcggcgcgtctaaccttgagagggggatggtgtatcagggttacacgcacacgtggctacagtcacttgtaactctaacagacacgacctctcttagaggttcgaaagactttctcgatcttggtgtagacacaccaaaggctacatacatttacgatcaccacgacggatgtggaggactggaaaacagccgaaggttacctttccgcgctcacgcctacgctgtacagcacactgcttcctttcgcgcagcatcaacgcccaccacgtcgacctcggcgacctgccgtaaacccagcccgccagcggggtcgccgcagacctccatggacaccgcccaatgaacgactcaacgcggccctggaccagttggagagcctgcagacagcgccatgtccgtcgcagcccgccatcaggaaagctcggcgccgtgcaggttgcatccgctcggcgatgcgacggacgtcgctgcgtaagaaattccgaacgcatgagaaggcatgcatgcagcagatattcgctggcgcgaaagctgacccggagcatgccggtggaccagcggccccgacgcgctgcccgatacccaagtcgacggtgcacgagtacttccagggtgtgaatacgccgcagcaccagttcaacttcgacgacgaggccggcgagcccttccgtcaattgctggtggcgttgccaccggcctctgcggcaatggatgcgctcacatcggtgattgtggccgatgaagtggaagacgcagtgcatcgcgcgcaggcccgctccagccccgacatcgatggcatcggccatgacatttacaagaccttcctgccggaactgctgcctgcgctgcacgctgccttcgccgtatgttggaagcacggcaaagtgccggctctgtggaaggttggcacggtgcagctaatctacaagaagggcgacccagagagccccggcaactggagacctatatgtctacaggcgtgcatctacaaactctactccgacattctggcgagacgccttgtgacgtggctcgacgcgaacaaccggcttaccgacgcgcagaagggcgttcgcagcgtcaatggatgcgcagagcacaacttcttgagcacggcggtgctcgaccagacacgccgacgacccaaacctctccacctcgtttggtatgacgtaaagaacgccttcggctcggtgccgtccgagctcatctggcgggtgctgctgctgctcggagcggacgcctcgtacgtcggacgcctgcgtgacatctacaggggcgccgtgttcacagtggcgaacgcagcggatggcgcgacggaccctattgagctacgcatgggcgtgtttcagtggtgccccctgtcgccatatctgttcctggtcggcatcatgccgctcgtgcgcgcgctgcaggcacttgcaccggagatcggtgtcccgatgaccaaggaccggaagctgtcggtgacagcgtacgctgacgacttgaagacgtacagcacgtcggcggcgggcatcagcaaagcacacgcagtggtcgtacgcttccttgaatggactactatgcaagccaacgcgtccaagtgcgtgtcgctatcagtgaagacagacgctcatggccacctccgcaaggacaaagtgcgactgacgctggacggcgacgtgatcccgtcgctcacactagacgaggggtacacgtaccttggtgtaggtaacggcttcaaccatgcccgacaccgtgggtccatgggccccgtgctgcaagagatgaaacgcatgatggccgcaatcttccgctccccactcgctccatggcaaaagatcaaagctatcaagacgtacgggtaccctaaggctgactacttgctgcgccacgtgcgcgcctacaagacacaactcgagagcgtggaatcggcgctggcgcgcggcctgcgccacctacttcgcctcaaccagtccagcacgacggcactattccactccccggtggacaagggaggcctaggcttcgtgtcgctagttgacctgcgcgccgtgctgcaggttagccacgcgtggcaaatgctttactcgccggacctgttcgtgcgcgaggtcgcgcaggaacaggtgtggcaggtgatcgaaaagcgcttcattgttgaccctgaccactggcgcggccgcgtaccggacgccatccagctctacctgaacggcgagcttggatcgtcaccatttgcgcgtcaaaagcgcaagtccggcgacatcggttcgctttgggctgacgtcaaggaccgcctcgccgcacgcggactcaagctgacgacggagtcggtgcggacagagggcggaatggaggttgatatgatgttgcaaatgaagctgccgcaccgcccgcagccgctcacccacaaagacatcacgcaccagctccgccagcacgtcaagctaacggagctcgcgcgatggaagtcactcgaaacgcagagcgacgtggtgcgcgcgatcagcggcgctggcagcgcttttgtggcacgcggcggcggcctcagcgatgctgaataccgctttgcactgtcggcgcgcatcgatttggcgccgacgcgctcggtgctccgtcgctggaatgagcgcggcggcgtgcagtgccgccaccctcagtgtaccagcgacgaaacgcggcctcatgttctgcagcattgtccggggaatgcacgtgccatcgacggccgccacgaccgtgtgcttgcaatgattaaggccgcaatcgaccccgtcgtatcgaagcgtggcagccgactagcggcgcgattcgactcgcattttgagggcctacctggtcgggcgctccgccccgacatccagcttttcgacgcggctacgaggactgtgtccatatccgaccttgccgtcgcctttgaagcgcagaagaccgacgaccccaccgtgggcaacatgcgctctcgccacgacgagaaggtggccaagtaccagcgggcgaggagtacctggagactcttgggtggcgagtccacgtatcagccttggtgtacggagcactaggtgcggtgatgccctcgaactacaaggtgctgaccgagcacctccgtctcaccaagcgtggggccgcccagctcagccgacgcatctcggtgacctgtgtgcaggccagccgccgcatctggcggatgcacgctggcgagatcaattgcattgacaccgctcgacacccaactacaacctcggcggcgacatcgacaacaccgtcggcgggcccagtgcccgtgactcctacgctgccaacgacgacaccaaccagcggaccacgacgttcatttacaagatggggcccgcgcctccacccggcccggccagcaccagcaactctacgagcgactcaccgccgcccaccacgtactcgtgatcgcgggcggcaacaatctcaacgcctccatggcaaccacgccacggaccacagaaactagtgaacctgggcccctcccggtcccaatggtactctccagcaaggacatcgccgacttcagcccaatgtagccaggtatccattagtgtagcattccacagacacagccagcaggatacatgcttcccagggtgactaccgattggccaagaaatgcatgtatgaaaaatgagagcgttgacatgagccggagcaggccccttgcactccggtgctgtaagggttcaggaatgctcttttgagtaattccacagtagaatttttgtcagcgggggtgagcgcgtgcgccgcccccaccctcctcttccaagcaactacacttcttcggagcctacgcttctcgcttcgtgtacctacttctactgcgtgtctgctgcgtgcgggttgcgcgtgtcgatggcgatcttctcgctgttcgcgcgctgttcagtggttcgcagccgccggcgtcgccggtgagcagcatagcgtcgagcgcggtgacggcgcgtgaagaggacgacgccgtgagcgtcgagagcgacttcttcagcgacgcggccagcgacttcgagggcgcgggcgagggcgccgccgccgtggactggctgcccgtgctcgacgagacagcacctccaactacagccgcccatgctgatcaagctgctgccgaccaagttgccgccggcggtcaagatgctgacgcgcggacccacgatgctaccgaccaagctggcgatgaccgtgctactactgctggaggtggccgtgctgctgcctccacgctcgccgcgcccatgcccggcaacgaccagacgagcgagccccagagctcacgtctgctcggtgccgccgctgtcagtggcaactccgaaacagctcctgctgccgatgatgccccgccgctggccacgctctcggtcttcgcgcacaacgcgacctcgttcaggtgcatcgcgtgcgcctttgcagcgccgcagattgcagacctccacgctcaccgctgccggcagcaccgcggcaccacattcacggacgtgttccatggcggatgcgcctgtgccgcgtcgttcgcccagcgggcagcggcaacgagacacagcctccgctgcggaactgcgtcaagcgctcttggcgccgcgcgcccgacgcagcaaccagcacctgcagacacagaggcggctggaggagggcccacggtgacacgccgtaatcctcccccagactcagccatcactaacacttctccctctcggtcgtggcgtgcgcatcgttctcgtctttgtgtcctttctcgcgccacaggtttcctgacgacgaatgcatcgctgaccgaggcaactgcgccgctgcgggcttgtttagatctctgcctcccgctcagcgattggaaccgctcactgcaagccttaacctcagtcatttgacagatgcgcacgtttgtacccatcaatgtcttcaagctgtacgatgtccaccagcccgcggacatcccatatcgacgttatgactgacgtgttttttttcactctgggatccgctctgttgacagcaagtccattgaacaactcatgttatgtacaaagtgagctaaacatgtacaactaaatgtcgcatacatctcgaacgcctaacatagcacgccctaaaagtcctattgggtcaataccaaaaccatatgattaaatgcataatttcacagagaagagaagcccagtgggtcaatatatatatataaaatggtgggggggatcgcacgcggtcagccccactggcaaaaacgctactgcggaattacttagagcattcctggcctctaaatgcaccgaattgcgaggggcctgctccggctcatgttaacgccctcattattttatcgatgtatcttggcaaatcggtaatcatactgggtaagcatgtctcctgctggattgtggctgtaaaatgctacactaatgggtccctgaatacataggactgaagtcggtatcgttgctggagggtgctgttggggccggaaggggttcaggttcactagttcctgtgggcggatgccatgatgatggtggtgccacctacgatcgcgagaagaaggacagcggtgaggcgatcgtagtgtcgctggcctggtcggaccagatgaaggtgtgggccccatgttgtaagtgaacatcgtgatttgctggttgtcgcgggtgacgggagcttcgcgtctggggaaataagttatcaccgatgacatgcaaccagacgacttgatcgtctctcgaggcgacctgccacaatggtgaagtggaaaatcacaagcatgttggtggagtaaaaccaacccggagcgttgtttcgggaggttacacaggttgacgaatagttatatggacaataactagaccaaaaacctggccgataacccgattggatagctgaacggtaataacagatagtatctgttgtagttacacttagacgaacctacatgtacaacagagaaggaaacttacagttcaagagcaccatacggttcaagaacatgtttactctcgacagccacaagacagcgcctttgcacaatcagttcctgatcgagccgtcgagcccgctgccgcagtggcgccgtttctcgcggtcgccgaacaccactgtgtccaactaatacattgtccaactcatgcaagctcagctagacaaacctgccgcgcaaatggcaggggtacgaggcgcatgggggaaatccctcaagaagtacatcaccaagcgcagggaccccctccccccagcctaccaaggcaaattttatgaagaccttgacttctgtcgttttgacacagaagagtactacggtctcccgcaagacctgccgaccgccacctttgtgcctatcctcgcgggcaacctgaagctaacggctatgaatgggtacagagactttagccagcacgacctgggcgcccggcatttcccaaacgtgaggtctcttaaagactaagatccggaagtgctttcgctctcgtgactttgagtatgacctccagccgcgtctatgcaacctacgccaacacggcttctaccacggctacctgtccgagtcccagaatctgctattccagtgtatggagccaatcagcccggtcgagcagcggttttacttccaacaaggtctgcggagcaacatctaccgctcgatcaatgagaagcgctcgaagaagctatcgactgggctcccattttgagcacgcacacttcgcgagcacgggcaacgacgacgttgactgcccttgcgactaaatcggccacctgccactggtgcaaggaggttagccacattgcacctgtcttgctcggaagcaacgtaaatccgctttaacccctccaggccgagcaataataatagtttaactgcatataaatgtatatttagtaccgttttgtatacaacggaatgtggaaaagaaggtttctaggtagagccggtcgttaatgcgtattggacaagtctaaacatacacaaaactgcatattcgaaattgaatactcagattaagcctgcataattcaacgtagtctgacgtgagtaaaacaaacctcaatacagacccgagacaagagcggctcttaaagccccacccccacaaaaattaagacaaaatctatggagtaaataggggtgtcactcccagaaacttccacaatcagttgatttagctccctcgacgtaattacttaaaggctaccagtttgttggacgcctcttgctgctgctagccggttcaataggtgttagccgcgcgacaggcgtccctggtgttgatgcctttcactgcgtcggcgggtcggcgcattcgaattcttctccctaggaacgagcgtgtcgtggttccactcacggcgccaaacatccctgaaagtcatcgcgacaccgcgcatctggcggcgtagtttcagactcaggaatatgctgactgcactcaccacaaatgtatgatgtagtggcagcccttttgtcgtcggtgcatagcagcgagcaaaccttgagggcgggttggtggcgcttcgattgcgttggcttgtgtcgccattcgtcgagttattgcggggcgtgtgtcggctgggtggaccgtcgtggtggctgttcagccgcgtctctcgcggtaggttcccgcacgccgaaagtgttagcatcgtggcccgaagctgacagatctgtaacttaataatgtacttgagagtcacgggtcgagatcctttgttcttgtgataagccatgtgcacgatataactgttcccaaatgccaggccaataagaccaactacaagtgagttgtaatatttttgaatcggacagcacgctggatgagctggtcgtggacatccacaccttccatgaaggcgtggtagtcctacacaactcgaggataaggcacctcttgctggattgcgcggtcttgccgaaccacacggttcagttccaggctccacccagtgcagtagtatatagtggaacactacgaggttagtttttttacgaaattggcaatatcgagatattttgtagaaactccacatgcgctgaatttcaagcgccacaaagttgtccaaaccaggtttaacacctctacaagaaccgcaaaaatccgggtaagtagcaaggtaactacagtcgtgcacctcgttttcggcggggtggaccatataagtacctcgaattcaccaattctcaggaggtgtatcgtctgtagtaaatacaaattcaatgatacacgttgtctatgtacgcaaatccgaatacattatccccggttataaatttataccggggccgaaaacgaggtgcacgactgtaccttcatcaacgttcgcaaaatcaaccccgaggcagctacctttacaaaataaaaccccggtgtacctactttcaccaacattgacccacataaaacatatgtttatgattttgtaacggggttacacgcgagttacgcgaagggttacgaagtgggtacacactgtcccacctaaatcagtaggagaatcagtacatggcttcagagccactgattatgcatatgactagagttcaccatgctagatagtgaaccggatacatttacaccgtcggcggctttgccgcagtaaagggaaatacattcagtttgagattcacacagttaagagttaagggttgactcttggagtccgtaaggtgtacggactggtacgttctggtattagaacgggctatagctacggcagccccgctgcagatttagtgaagctcactaagagcatatccaccggtcgtgagtaagactaaattttaccccttttctgtcaatatttaattttagttttagttttgtacagctccacgtttgagtaaatgctgagcaaattgctccattttttacgcagatcaaatttttgcacaagtttgccaacggaggaggctttgagtaaaaggttgagtaaatgtcgaccagccagtagtagagccaagtcaagcgttctaagcagcgcaagcgtcacagaccgcagtgtcgcccttgctacgtcatccgtgggtcttcctcaacgtgctgccgggcccgttttcatctttatagggctatacagctaggactcagtgctggcgccgaaccaagagctttacacgcgctcgctgcgtccgtcgcacgcaattccatgtcaccatcttgagttggagtcgacgctgccggagggtgcagacgtcggcgcttgttgccactcagcggcgcagttgcctcggtcggcgaggcattcgtcgtcaggaaacctgtggcgcgaggaagcacacaaagacgagaacgatgcgcacgccacggccgagagggacaagtgttagtgatggctgagtctgggggaggattacggcatgtcaccgtgggccctcctccagccgcctctgtgtctgcaggtgctggttgctgcgtcgggcgcgcggcgcccagagcgcttggcgcagttccgcagcggaggctgtgtctcgttgccgctgcccgctgggcgaacgacgcggcacaggcgcatccgccatggaacacgtccgtgaatgtggtgccgcggtgctgccggcagctgtgagcgtggaggtctgcaatctgcggcgctgcaaaggcgcacgcgatgcacctgaacgaggtcgcgttgtgcgcgaagaccgagagcgtggccagcggcggggcatcatcggcagcaggagctgtttcggagttgccactgacagcggcggcaccgagcaggcgtgagctctggggctcgctcgtctggtcgttgccgggcatgggcacggcgagcgtggaggcagcagcacggtcatcggcagcttggtgcgcgtcagcatcttgaccgccggcggcaacttggtcggcagcagcttgatcagcatgggcggctgtagttggaggtgctgcctcgtcgagcacgggcagccagtccacggcggcggcgccctcgtccacgctcactaaggcgctggccgcgtcgctgaagaagtcgctctcgacgctcacggcgtcgtcctcttcacgcgccgtcaccgcgctcgacgctatgctgctcaccggcgacgccggcggctgcgaaccactgaacagcgcgcgaacagcgagaagatcgccatcgacacgcgcaacccgcacgcagcagacacgcagtagaagtaggtacacgaagcgagaagcgtaggctccgaagaagtgtagttgcttggaagaggagggtgggggcggcgcacgcgctcacccccgctgacaaaaattctactgtggaattactcaaaagagcattcctgaacccttacagcaccggagtgcaaggggcctgctccggctcatgtcaacgccctcattgagcagcgtcaagcaccagtcaggtaagtatgaaatggattcagaagccaacccgttatactatatagatattgaacccttacgtacatattagaatagcgaccaatgtataggtggtaagtttttgatgtgttgcacacaatggcaagtagttaacagtcgcaaaaagtctgtcttagcggatgatgctcagtcttgcaaaacttctactttaaaccaagtttaggtatgttttctatagatttgtgtattgtctaaaatagtggatgtagggcacactacaagagtctattcgaataaatttctgtctcggaacaaatcacagctccgcatcatggcgtaggcttgtaaggattgtgaaaacacattcagcctcctaaagatatataatttgaaaggatttgtccatcggttgtgtgactatttacttcttctggaggtcgacagcatgcgcgacgctatcaaaccccaggtttttcatgatagcgaaatcaacacaaacgactagaacatgtcgactgggctccaggcttgaataatttcgagtgaccgcactaacatttagcgagcttgtcaattatatatggattaaaatgcgtatcactaagtactggcttggggccgatcaccgacgaacagcacaaacgaagtcatcatgcggcaacctacctacctcgtttggcggccaaagcagcacagaacctgagaagcgccacataccaaccacgcttccacgaacgaattcgcgtccaagtcgatttagcctccatccgcccaaatgtccccgcgccgaaagatattcaagctttctggggcacatttgcgtgggccgacaacccctggataccggacagcaatgcaccatcactccagcgcagcaaatacgaccgaatcaaggtgacatcaattgcaaatttaagtatcgtcagagcttctgaagatgtttatgaggtgagagtgcccactgcggatgggttcccggccggtcacaccatcgcaaagctggagcggtggctcatagccattctactcagttcacccaggctcgacatcggtcaacagctaggacgaccgcccgctctggtgctcagacggcctccttcactcagtaccagctatacatggtcggtcgaggtggaaggttctactgtacgcggaatctccaacaacggatcggcaactctcatgctggagcagaagccgcggcattgagtggcaaatcaagtctcacgacgaagcaagcgcagatgctagcgcgctcgaaaagcacacaggaggacttgtgttcaaggcaaacccacagatccacggatatccgtggcaagtaccggactcgatgaggaatcgcagaatccttcacgtgctaaaacaacagcccaagaagcgactcaggaaagcagcaaacccgaacctgggtcaactgctgacgaaatgggcggagcggagccgatgactggattcgaggtcaccaaaggcaactaccaaagcatatttgtgcgcacggcaatttgctgacgaacttccaagtgtgggtcacctaccgactggcgactcatcagctgaatctgttctacgaaggtaaaggtgattatcagggatgccctatggacgtggcgtgtgcagagattcacattacgagcacgcatatcacttgggcctgtattcgagtacagcaattctggcggcgctgtctcgagcactggctgggtcatgaagtctcaccggactgtctcgaaggacacaaaagctacttcgcggctcggacagcaccgaacggctatggcgcaggatctctcaacgctacgggcaatggagaccagagaacggggagtctctccgccaaatctggtgggtactctgcagcgtcgggtttgcgttgctctggcaaatacggaatcaggtggtacacgagggacaaacgtggctgccagctcagcaactcgactaaatgtggttgacgtgcatgcgccagctcaacgcaatagcgcgtcggaagcgccttcgagcgccaacgaagatacaaggaatgcagtttcaactaagcctcgactgttttgcagacataggcctagaagcgaatccgatggattcccttccgcagcctgcggcgtggattaaacagacagagcccactctgatcactagacttagaacataccaggcagctattaactaaggttcaatagactaccttcttctttctcgcgtatcactaaattcagccggagattttgcgaaatagttcatatttattccgtttttctggcatgtgctgatgcacgtcagttgcactgaaggtgactgagttagagtcgaaaataccactgtttataatatttatgtcaaaatattacaataattcaagtgccagaattatccaggaaatagcactgatatctaagttgcacagtaataactcgcgaatattttacgttttcagccggtggtctaatgggcgttaattattcacgttgttctattggttcgataaatacagttgttcagtagacttctgctttaataaagaacacctgatgcatacaaaattgtgaaaggtaatgaaatattacggtaacgttaaattcaacagtgaaacgttaaattcaacagtgaacgcatacaatatccaggattataggttttctagtggtattcattgaagcagatgtctatacttatttgtggagattgtgttcttatcaaggtattatggttctatcttgatcgcccgcgtcccttgtagcatacttccattaaatgtaacaactcgtcattaggccaaagagacgatgaccgcagctatataatgctatccaaagcaaggccattcgtcaaccataatgctgtagccaagttgaatcacttcagcgatggcctactcgacagccttggccgtggtcgcgatataaatttgcagcgtcttcgaggggatgacgtgaccttgagtgagtgagtgagtgagtgagtgagtgagtgagtgagtgagtgagtgagtgggtggtccatctcggacaacacaccgatttacacgtaggcaactttgtcactcattaagcgcaggctcacgcatccctttgggctacagacagcgatgaaaaagccccgtaacgaaaaaatcaacctggccctacacatcacaagatactgctcaaaaccacatcctattttagtatagttgataaatcacgtatgtgattctagccaatagtagagtgaatgcatcaaatattattcaactatattgtaaatacattgactggtttgacggcgcgattctggtgtcaaactagtgccaccaaacaacacaacgcactcacttttcaaagacactccgatgttcagcaccccgcaacacccctagcagcgcacctacacgatcgaagagaagtgatatgctctcaggctagcagtcgacgtccatggcaagcaagttgccgacgctttgtagtgcgttactggtatgcttaacaagtttaacgttttgtacaaaccgactgtcgtaaagacttttgcagcatcactggatgcgatagtcctgatggtatggtggaattgcagattttctggaatccctccgagctgcagccgtgactggttggctgagaactcaatctgggaaacgatgacacgtggctgaatgttgacgatggatcctagctggactagtgaccaagctgtacaaggtttggtggccccggatgaagatgcccccgaggaggacccggctggaaccaagtaccggacgagaggcaaagcccaaggtagtgttaaccccttagttactacgctcaacataagcggtgtataccctaattccctcttgtcgcagcgtttatgctatgttggaacgctcaacataagcagaaatttcacttggggtttgtatggatccttttttgttatcctggtatacaaaaagtaagatattttctgtgtgtaaaatgggcacatgtacagggctaggtttgcctttggtgtgggctttttccaaagtgcaagagaaaggatactgccacccatcaaattggtggccgacggccactgattcccctcattcaagaaaacgaccgccagacgaacaatggtcgcccccgtcgggaagacaccacgccacacgctcacgccggcggagaagaagaagtgcctggaggcactgcggcgggagcgacgactacgccgcgcggaagagaaggaggcgagggcacgagctgcggcggtagcacccccgaagacgatggctgcagcggctgcgaatgcgaacctcgcatctgcagaggcgaagcaggccgtggcggaggcgacgacggcagttgcggaggcaatccccggcgcggacgaagagggggcagccccagcagagccgaaggcgacgggcaagacgcggaaggcgccaactcggaagaaggtgcctgaccagacgctagctatgtggaggagcgggccagcgtcggccgcgaccgccgcacgcgctcaagatgccgcaccagcagcagtcgcatcggaggttgcaggcgcaatggccagcattgtggcgacgattgtggaggaggcgacaccggtggacggagcgacgccccgtgtggcacctgactccgtgacgagcagcactcggccaggcacgaagccatccagctccggcaagcgcaagcgcgttgagacaacggaatcgaggaagcgccgacgcaggatcctcgatgaagacagcgcagatgatgaaggagacaatgatgaagaggtacgctatgctggacgaaggcaacataatgtgctggatattgtcgtttattcaacacatcgctgacataagcttactgtttatttgattctaggtggattcaagtgaggaggcgggtgtcagtgcagacgctgccggtgtgggcgcgcgtgttgatgtttcactggattgcgttgtcgatggtgaccccaatttgatggacgacggggccgccgcttgtacaggcatcaactcggacgaaaatcccgacgtgcgcgaggaaccggaggacaaagaagacgcagaggacgacgacagctgggacggcgactgggatatcagccaactgactgacgaagaatcggaggaggagcgggaggagcttcctgagtctgtgtgttcgtctgccgcgatggacaccaagtacatcacggcgatgagaaatatcgggtgggaatatggtaagttggactcactcaacataagtgagcggccgtgtatttgtatccaacatatttactagcatattttttggtactatttacaggtgaatcgaagtttggaccagaccccacgtatgccgacctttacgatggcccatacggcccaacccccagcgttcttgaagttgccgaagatccattggcgctcctgttctacttcatgccgcccaagctctgcgctcagattgcagtggagagcaacacgcaccaccgtccattcccgggcgcgcgagggcgatccgaaagcagcagcgcaagagtggtggcgaagttaaagacctcggcgacattcggcgtcgcctcgctggtgtcaaggacattgaagcctatgaggtgctgcaggtgatgggcctgctcattgccagggtgctggcaccgattcgcaagggcattgcagcgcattggtcagtggcgaaggtgggcaccatgcctgcgaatcgctgtagcctgttcatgagcaagaaccgcttcttccacataatggtctacatgcacttgtccaacaacaagtctccgaaggctaagaccgacagagcctggaagatccgtccagtcgtcgacgtgctacaacggaccttcgcctgcggttaccgtgtccctcccatcatcagcttcgacgaagcaacgctgccgtcgcgttcccgatacaacccaactcggcagttcaacaaggacaagccccacaagtggggacgaaggtgttcgtcgctgcgtgtaccaagacagcttactgcatgaggtgagaagacccgtggtgtaatgggcctactttagcttacacgtgtgcgcgtgtatgtgaggaagcgtagcttagtttaaattagagttaattatactcgggcctccgagtatagattaatctaaataaacgatccaaataatgtttttgggttaaaatgagaactgctatttttgttttatgtttctgacttcctctaaatgtaatattctaagataggaatctgccaacggctggttggcagaactccaatgctacgtatgtcgctcattggctaagagatgctgctctcagccaataggaatcctaagtctctatggaccacccgtcgtggtggtcgtaaatgtatgtagcctttggtgtgtttacaccaaggtcgagaaagtctttcgaacctctgacagacgtcgtatctgttagagttacaagtgactgtagccacttgtgcgtgtaaccctgttacaccatcccccctcaaggttagacgcgccgagtcacggcacgtcaatcaggaaattgaccattcgtcaattcttcacgttgggagaaagaaaactcgagctcattccgcaatgagctcgctgcagaagaagaccgccgccacaacagagggtaacctctctgttgctcagtaccatgagcgccagcaggcaaagcgcgatgcgctcgctgtaaaggccgcgtcggggacaacccagtcggagattgtcctcgaaggttcctctgtagtcaacgacgccgttgactacggggatgacgacgtggagatggaagagggcgaggcctcttccaacaagcgcaaggagtctatcgacagctatagtctcgacccgcatgccgggtcgagacgccctcgtgaaggagacgattcggacgcttcaagctcgaagcgttcgcgcggcgagggcgacactctgctctccgctgctggggctttaagctccccgcgtgaggtggcgtcttcaagttctccgcgcgctgctcaggcagcgcgcgatccgtggatgccggctgcgtcagaggtcgcagaccgtgtgggcaacaccgtgcctccaaatgaaatcccgctgtacgtatgcagcgggatccacgatgatgctgtggcggaggagcagcactttgatccgttaacgaatcaaaggcgcgattactatatcggactctttcacgaactccgatacttctccagcaagaagacctcttctcgcagcaaagtgcctgagtggcaggcactttgtcaaagttggtatgcttttgttgagaatttcaacaagaaaccggctgcttaccgcgagcgggttaagcatgcccgtgaacgcttcgagacattctcgacgcgcgggaggttggagcagctccacagatcctctgtggacgctggtattccatgcgctgtgcccgaaggccaacagtgcacgttgtgtcttccgggtgcggtgcacttgagcgaccgcgacctaaacgggtacacgacgattcgtgtacctgagagtctcaaggatctccgtgtcaagttcctcgcacgtgaggaacgcgacgatcgtgggacctcgggcgctgtaggtgaccacagcgctcgcactaccttcgcgtcggcagtgcgtggtgagcttcgtactccctcaccatttccggaacgtcctgcagcaggacgtcccgtggctcccatgtatcttggtggggcggaaaccctctccaacgaatacgataacgaaccggctgccggttcgttttcgggatactatggttcacaatacgctccacaatccagcgtattgagccgcgggcgtcgcggatcggaggcggcggtggtgggaacacgccccgggtatggtcaacctggggttgaccttggcccgacgctcgaggagcgggtcgctgctgtggagcagcttcagagccgggagttcgccgctctgaagcaggagatggcgaccctgagagctcaagttgctcaggcctcgcagaccgcgtcggacatctctgtcgacgtgggaggtcgcgtcgcacgcttggcccagcgcgttcacgcgctggagcagaggttcgctcccgctggggcttccgcttcgggccagccgagctaggtggctcgtgctgctgatatggcttcagccgcccgacgtaaaaggtcggatggaggcgcatgctagatggaatatctagcgtgtaggcgttgccatgccgtaccaacaccgtgaacggcccgatgaagcgcggagcgagcttgctcgccccgaagtcggaaactgcatgtttaggcaggttttgagtagctagcaaaaccaatgaatccttcttgaattcatttgtgttacccctgccaacattgtctgcgttcagcttctgtcggtcgaccgaagctgcaatagcgtcttggacaaaccgaatgacggcttgtctgcgctgcacgaagttgattacgtccgagccgaactcgttcagctcgtttccagcagtaggcccggcctctgcgttcgtcttcgtggtgtctgggccctacacagacccgttcttcttcttcttcttcttcttcttcttcttcttgtcagtgtatgtgccccgcacagacacgttcttcgtgcgcttgtcggcgtctgtgtcctgcacagacgcgcggttcgtggctttacttcgtgtcgttgcggctgacactgtgcaagtgtcagcggcattctgcggctgctgcgttgctgtcggagatcctcccccacttaaggaaggagccaccatcccgaggagactcgggaggcgtgggtgcctgatggcgttcatgtagaacggtgtatgcccggtcgaggcatgcaccgagttgttgatggcgaactccgccatcggcaggcactcgctccagtgttggaacgagtgagcgtagctcttaagcacgtctacgagcacgcggttcacgcgctcggtctgcccgtccgtctgcggatggtccgcagtcgacatcgaaagttgactcccaagaagtgtaaacacttcttgccaaaggtgtgcagtgaagcgctggtctcgatccgacacaatgtcgatcggcatgccatggtgtttgaacaccatgtcaacgaacagacgcgccgtctgtttcgcagtcacttcagcgggtactgcagcaagatgtaccatcttgctgaagcggttaacaaagaccacaacgcccgtgttcccctggcggtccgggggaagaccgaacacgaagtccaaagacatggactgccaacactcccgtggagttggtagtgactgcaagggaacctgcgcgaaaggcgcaggcttcacacgttgacaaacctcgcaagcacggacgtacttgcgcacccatttatactggtgggcccagtagaagtctcgcgtgagaagaaggtatgtcttctcacggcccggatgccccgccgtcggtgcatcgtgatactcatacatgatcctgagtcgcaggtcatggtcattgggcacgacaaagcggtccgcgttgtcgtcgactgcactgtagagtaataacccgtcgtgcacccgataacggtgtgcacgagcacgaagatgcttcggcagcttctgacgagctttgccagagggcgctgagccataggccagcaagagcttcgcgtccgcgtcgtgtgcctacgcgaccttcacgtcgtccaacagtgacgacgttggggtgctcgatcgcatggcgtcaatggcattgacgtcggcatcagtcgtggcgtagtcaggtcgacgcgagagcgcgtcggccaccacattgagtcttccgggtttgtactcaacccggaagttatactctgcgaagaatgagagccatctcgctatccgttgcgagatgtgcggtgacttcacagccatccgcagcgacgcgtggtccgtatagaccacgaacggtttgcttccgagtagatacactcggaacttcacgagtgcgtacttcatggcaaggagttccttgtcatgcaccgggtagttgcgctcagccggcttcagctgacgcgattggtagtagacgacacgatcacgaccctcgtgatcgtgctgcatcaacgcacatccgattgcgaagtcggatgcgtcacacacaacgtggaacgggcgatcttggtcggccaccgccaagatcggcgactcagtcaagccccgcttgactgcatcgaaggtctgctgacactcagcagtccaaacccactcggcgtccttcttcaggagctgtgacagcgggcgtatcatgcccgcgtagtccttcacgtacttgaacaagtacgtggtcaagccaaggaactgccgcagttccttgacgttcgacggcgtcggccactcattgatcactctgaccttctcagggtcagggcggacaccgttcttcccaacgagacacccgagcacgggtatctcgctcgccccgaagatgcacttcttcaggttcgcatagagcttgtgcttgcgcatgagcgcaagcagcttccggagatgcaccttgtgcatctcaacatcgctcatcccgtccgcagcccggctgtggacgaacacatcgtcgaagtagctcggtgcgaagtcgcgcaccgagcgcaacaagtgcgtcacgcacctgttgaaggtcgcaggggcgttcttcagaccctgcggcatcactagccactcccagagcatgccgctcggcgggctcacggccgtgagagtgagtgatatcgctctcacgcatgaggatctgatagaacccatcgcgcagatcaagagcactgtagatagtgctcctggtcatcgaatcgatgataacatcttttcgaggtatcggcgtctgcgccggtatcgtcgcatcgttcagcttgttatacgcatgaacgatgcgccagccgccctgtggctccttgacacagaacgtcggagcactgtgcggggatttcgattcccgcacttgtccagctttgcgacgactttcgaagaagtcgtcgatcgctttgacctgctctcgcggcagtggccactgccgcgtgacacagtacttcgtccccggcacgagatcaatctcgtgctggatgcccttgtcctgcggaagctccgcaggaatctcttccggaagtacgtccgcgtactcccgtaagatctcgtagtagggactcgttttcaacgagtcccagctctgctcttcaaagcgctccttcttcgtcttcgcactgagagtgtcctcgctctcagtggtgctctccatgaagaactgcctcagttcttcattctcactcttcgttttctcggcgtccgagagaatgcatatttgctcgatgcgtccatcgtgcaagtcacgcgcgaagcgcttccagctcatgactggaagcgaagtcaactccgacgcttgcgtcggagggttagcgagggtcatctccctgcgcctgtaccggaacccggcacaggtacgcgtcaagacgttcaacgtctcgacgtccggcttctcagcctccgtctgcccggcagacatttcttgtagcgtctcggccccaggccgaggcttgcgcagcgaccttcgcatgcgccgtcttcttgtcctgcggatcccggctccgcatgactcttgacttcgtccaggcccagccgtggacgggtgttcttcttcagtaccgacggcgggttcatcccgcgggcgagcgacttcaagcccggctcggtcgcccggcgcttcgtcgtgcagcccggccgcacgacagcatgcaagtttttccggtgcgggacgtttgcaaccgtccgcaccgcttgcagcgtcgacacccagagtcgacacgccattcttacctcgacgcctgttattagcggagccctccattacggaggttgcgtcggctccccgagccgacgaatcaaattcacccaagccatcgactcccggagtcgacggcgttacgtcaccttggctcttattattggccagacctgatccaatcagattcgcgtcagcctccacggctgaggcgtgtgactcgcctgcgtcatccgtgccccttgaggccggagactcttcctgattcgctgaaaagcgggtgtcgacctccgaggtcaacacatttccttcattagctgtcggcggcaacgccgacgctagctgctcttgagtgcgtgctcgcgcgcgcccagggcgctccgggacagcgtcattaagcgctgtctcgagtggggagtcgcgcgcacctgtcggtgcgtgcgtagtggcaacagggccatcgctcactgttccgctgtcgcgaccaaagcgcacgagagtgcgcttctcccaatcgatgaccggatcatgccgtgcaagccacgacatgcccgatacaatgtcaaacttatcgtccagatccaggacgataaagggctcgacaaactcttgatcttcatacgtgaagcgcacgcgtaccatgcgcttctcggtctttacgatggcacccgttgccagtcgtacttccaacatacttcgaggtatctttaaatcctcgaagtcaagccttgatagacttcgcagtcgaacaaagttcttcgacacgccagaatctaccaaagcacggagagagccgtttgctctcatcgagttcacattcaggatgacaaggtcaggcttgttatcttggttcttgcagtgagaatgaatctcactgggggctgcagtcctcaatgtcgcgtgtccaaggtcgacacgcggaactgcattaccagtagggcgccccgcgcctactagcgtctagcgttttatgtttggttgcgacggtgcccggcaccgccgcgatagccaccctgctggtgcacgggggctgtgcacttccgagcaaagtgaccgactctaccgcaacggtagcgtcgcacattatttccctgcgactgctggggtccggcagttgcagcactcgagaggtccatggattctgggcctcccgtcctcaccaccgggcgtggctgtggcctcggcacatgtgcatgcagcttagcctgccgcaggctaaacacctcctgcattacaagagtaattgcagcttctagagtactcgggtactcacggaagagataggtcttcacaggcccatctctcagacccttcatgaacgtgacgaccttggtcgcctcgtcgatcggattggtcacgatgttcgagaccaagtaccgtgctctctgagcgtaagcatggacatcatgcttgccctgctgcaggccgaggaactccgccctcgaccggaactcgttttgtgggggctcaaacgctcgtctgagctcctccttgaaaccctcgtacgtgctaaagcacgtaggatccgagagtcggcgtccatacgcccaacttcttgcgcgtccgccaagacatgacatggcgaacgcaaccttcgacaacgggtcgacgatacgtcgagccgcaatggctgtgtcgcgttcgacaagccaacggaggagaggttcaccctctcttccgacatagttgctcacattgagcttcagcgattgcgcgcgtggtgtcgtcccggacgacacagcggtagtagcagcaacatcgcgttgctccttcagtatgaaacccagagcaacaccgtgttgctctgtcgacgttagcgtacgcagcatcgtagctacagccgcctcaccaatgactgttgacagtcgttggagagcttcccactctgggtccgacaggtggggacagtcagcgcgtgcaacgtgagttgcaggcgtagtggagctttccatgggcacctctgtatccacgggaaggttctcagctccgcgttcgtgcggtgacgtactaacttgggtagtcagtcgttggacggactacaaagtgctaccaggtgttatgggcctactactttagcttacacgtgtgcgcacgtgtacgaggaagcgtagcttggtttaaattagagttaattatactcgggcctccgagtatagattaatctaaataaacgacccaaataatgttttttgggttaaaatgagaactgctatttttgttttatgtttctgacttcctctaaatgtaatattctaaactgggaagctgccaacggctggttggcagaattccagtgctatgcatgtcgctcattggctaaaagatgctgctttcagccaataggaatcctaagtctctatggaccaccgtcgtggtgatcgtaaatgtatgtagcctttggtgtgtttacaccaaggtcaagaaagtctttcgaacctctaacagacgtcgtatctgttagagttacaagtgactgtagccacttgtgcgtgtaaccctgttacacgtggcgagtcggaactcgccatgggatttttttggcctaagtccttacgttggatggtaaccagcataagagcggcttggaatgttattgtacaacataaagctaactttattgatgtggttgttttactaccagaattgaagtgtactgcggggccaaggcgcacttgcagacgcccgtgccgacggacaacaactctggagaagctgcagtgctgcgcaacatgaaggcgctatgcccgccgtcgccaacttccccgtggcgactggtgatcacaaacaggttctacacgtcggtgaagctggcgctggagctgctgcatcgccggctgtacatcaccggcgcgacccagacggaccggtccggctacgccaagaacgtcatcacgaagaagaataccaagcaggtgaacaagcggaaagtgatggtgcctccgcaggggaccacgaagctagcggaaaacaagcagttccctcaattgacggcagtcatgtggatggaccgccttccggtgcacatgctgtcgacaggaggcagtcgacgcaccatctccatccgtacgtatgctcttactttctacaatggatcgattgctaatctatctaatgatgtatgcaacagtgcgccgcattcatggcttcatgcagtctgttccggcgccagagatagttcgagactatcaccgctcaatgggcggcgtcgacgttcatgaccaactgaggatgcagcgctacagtgtccagctagcctacaagacgcgcaagtactacaagaccctcttcttgggcctctttgacatggcgctggtgaacaccttcatcatctaccgcttctacagaaaggtgaacaacaagcggcccccaaacactttgcttttctggaaacgctgatggagcagctactcgccgtcgactctccggaagcgttcgctgcgatcgaggtatgtgatatgttgccggttcaacatagacgtccacgcttacgctgatatccaatatatcctcgtgttatgttgttgcttttgattgcagcaatcgacaagtgctcgagaacggacggcggcttccccagtccgagatggagctacgcagcggtcagctgcagacgaagggcttgcaccagcggattgtgaccaccggcttgaagagaacccagatacagtcgactgtgagcaggggacgaagcgccgacaccgcacatgcaaggtgtgcgccatcctcaaggtgaagccaaggtaattcaccaagtacttctgcccagagtgctccacgggcgatcgacggtgcgtggcagcgctttctactgctatgattctgtaatgcagattaacgtgttatgtgttgatgcagcaagtatctgtgtaatgtagcacgggaggggaaagccaaaaccttcttccagatctggcacaccgactggagcaacggaaacgacaccccgaaggcgctcctgcaagagcacaagatccgcaatcggccgccgccctcgcgccctggtaagaagcgacgtcgcatcacgcaaggggggtgccacgccgtcgcggattccgagggaacggcgggagcaggtggaggtggcgcgtcggctagcgaggctgccgtggaagagaatgatgaaagtgcaggggaggcagacgacgaatcgtcgtaggcagtgtgtttgttctttggtagcttgcaatcaatggaaactctacttctgcggtttgcaatcaatgaatgcgttactcttgctttcctgtcattggctgcaacacgtgaagccatcgctgctggacgtgtgcaacgatgcaaagatgggctctccaataactgggacattcgttatgttgatttcgccatctgcctcattttggctgcataagatggctttatgttgtaggagccgctactatacccatctgtcttctctctcgcacaaccccatccaccctctccaaatccgtacttacgcggcgacacatacaaaaaccaatatgctcggatacgggacggtaaaaaatataccctcgtaaagagagccgggaagtaagggggttaacgtgcctccgacaggaggccacctgcttttgatatagggtatggataaaatttatcatcgaaacggcggcaaacaaaaaattccttacgaacctaagtacgaatcgcgatttagtggctttatcgtgaagagcgctatcttgcgcacatttgagcccttgtttgcatcgaaatgttgaaaattcgaggagttgtcggcacttgaaaaaactatccccatttgggaagggtcaaaatcctaccacgttttgaacgatagtgacttcaattctttctcaaaatttgcttagcgtacattatcagaaagctctcgttcaaagcaatcgcattaaagtcttttccgctttctacgagtaattttcactttcaaaatttcgatgtccggataggtacgaattctgattggtcaactttaaagtcgattatctcgataactcccaatggcgcgtaagtaacaaaatgttacttacgcgccattgagagttatgcagcgtagcacgacgttaaagnnnnnnnnnnnnnnnnnnnnnnnnnnnnnnnnnnnnnnnnnnnnnnnnnnnnnnnnnnnnnnnnnnnnnnnnnnnnnnnnnnnnnnnnnnnnnnnnnnnnaacgtcgtgctacgctgcaagctgggctcctcgtcgttgattactcaccctttgataggacttgatttctaagcacacaatcgaattcaccagctatccatcactagctcttctggcgccaccccgatctgcaggttaacagccgcagtctctacaaaaaccataaccatgccgctccgttcccgagaacactgaacgtaccctcggcggacgaccaggatggcatatctcaaggagagtcgcaaaccgtaacaccagccctagctaatagaacgcgaggcgtttcggtggtgccgcggatagaacccgcgtgagcgcggtggcgcgagaagttgcaaggctgcgtcccggcggcaagccaagtcgtaagaacatcacgatggaagagtttagtggtctcatcaagaccgatacgtttgacacgggcgttcggcgctggtgggggaagttccaggacgcccggattctggatgggcgctgaaacgatctccaatgtcgcagcatctttgctgcttcactgaccggagatgacgtggactggtactcggaagtgcgcgcgacggtgcccaacctgacgctcgacatcgccggcataatgcttgtggacaggtttaacccgaaactttcagagcaagagctcctccggcgcattacgggcgagcctaagattccccaagaaacgtaccagcagtacttccagcgcctgctaaacatagcagatttgctacccggaggcgtcgccatagaggcaaacgcccgctgcgtgatgcacacttttatccggctggcgtgctacaagtatgctgacgagctcaaatcattcttaggacgattgcttcccgaaatctctacagccttcaacctgcagcacctggtggaccacctcgcgtacatggcagagagcgacgtacaattacccggtaaaaccgattcgcaggtgcagggcgaagtggacacgacgccaagcgccgcaaatggtccgaaggctagaagactcagaagatggacaagtccatgacggtgatcgtcgtgcacaaacgcaagccacctcatcgccctcaaggtggtggcaagcgagcccaacgcggggagtctagcctgcacgctgctccaaatcacttgcgcgatccttggtaaaactctctctatctatctatctatctatctatctatctatctatctatctctatctatctatctatctatctatctatctatctatctatctatctatctatctatctatctatctatctatctatctatctatctatctatctatctatctatctatctatctatctatctatctatctatctatctatctatctatctatctatctatctatctatctatctatctatctatctatctatctatctatctatctatctatctatctatctatctatctatctatctatctatctatctatctatctatctatctatctatctatctatctatctatctatctatctatctatctatctatctatctatctatctatctatctatctatctatctatctatctatcttgacttgtcttcactatgttcttgtcgtcgcagttgtccgcggtgccttgaagcatacttccagcaagtgtagtgaatactgggtacgtaagcgaagttcaaggttccacggaaaccgtacagatcctagctggtcggcttggtcggccggaaacatcttggactttgtacactggatcttcacatccgcgtggtcacttcgcatctccacccgagattcatagtcatctctaatcaggattacgccctactgctgggctctcacatccggggtgtcttgatcagcttcacggtttctgggttttcacttgggccggtcgggctcattttaagccataccctataccgaatttgttttgtagagggatacacccacctatgggatacaggatagtattagccaatcacagttgtgtcttcagattgacagggcttgacttgttgagggatacaccagtttcaagccagtattttttgcactctcggccgctcagcgcgcgatcatttctgcaacggcgagggcgccaccaagtcacccttgcctgtctggaggtcaaggcaggtggaaaacgacgcgggccctaccattttacactgctgcaatgaagatggctattgtcgagcacctgagactacactgcaatgtttgtttcactgtagatacgttctttccgggtctacctacagaaaagtatcaagggagaagagtagtggtgttaagatgggctcgtcgtttagctctatagctgctgggggtgcttctgtcggcggcaggaacaaacgcaaagcttgctctactgagcttcgatctcaagttggggtggtggcggcgaacaagctaataagttgggctgtgtcggcagccgcattggtgagattcggccttgagagacttgaggtagggtgctcagtttagtaattttgataaatacatctgggcgtccggtgccgattcgtttttttgagcaaaatcgggcgtctggtattttagctccggtagggtgtatccctctacaaaacaaattcggtatcgagagcaggcggcctccagtcggaggcactcttacgctccctggggctttgcctctcacccaatacttggctccagcaggggccctccctttaggacatcttcatccgggatcatccaaccttgtacacagtgtatgcgcgagtccgacctggacttgcttcccccatacgccatgccatgccctctcctagagcaagtttctccaccaaccaatcactgttagggctcgaaaggaatccggatctcattacatacaacaacgctcatcgagctagtgcacactcaagggcgccgagtcccaactgttatcttcaccactgggacgttgaagttatgcgttctggcttggtcaacttgctaccatcaatgtagccaccacatcacctgtaacccgtataccgacgccgtcaaaagtggcctatcatcgacaagggtcccgacgttaacgaggccgcttcctctgacttcggcttgtggtgccgcggtcaaatcctacgccatcatcggggcaaacccaaacacctaaacagcaggcgatcatgacggatccaaacgcagcagaaagtggtgtgaacaggtggacccattgtttgtagcccgcgtacgcgacaaagcgatgtcctgtcgaaacaaagctcgagaggcttaaacacgcaagttgaaagattagaaggaacctatcttcaataacgcgggccttctgtaccaaggacatcgcttcaaacgtattggccatgacgctgagcacatcgaccgtctggtcacgactgaccaagttgaccggtcaagatctgttcggcttccgtgaaaccttgaacttcgcttgcctaccccgtgatcgctacacttacaggaagtatgatacgagtaccacgggtgattaagacagggtcataggttgcggggttgagtactgggtcaggcgctcgaggttgatccatcccatctctagttgcggttgagctttccatcccaggggctcccatttcacaataccgattacgtttcaacgctttcaacgcagtatagcctcgggtgagaagtatatatttaaatcctccgtacgtgagggtggtgtgcgtgagctgcaggtaacgacgcaaaaatctgacacaaatcctagattatatcgtaccgctgatatgttccgatagtacaacaaaaaatatgttatccaatcacaaacttttatttacactaatatttatgcaactctctgggttttatatccagggtttctccgaggatagcactcgaacccaaattaacttttatttctaatatgtactaagaaccgaagcttaactcacgtacatcatgagaacgttccgataaatctgccctgatgggtgatattcctccttaaaaattatttgatggcatctcgaatggaaaaaatagcaccgtatgattggtaaggatcattccacaggatcattgtcatgaataccctgtgtacttttaaatacagaggtgaatgttatccatggtttgccatccactaaaaaaaacaattgttacctgctacgtgtccgtttaaaaccctgacagcctgttaaacgtttgctagtatgcaaatgttgtgaatggattcgtgtcatgtttgctgtgatacagtgcagaatactctcggttacatttactgtccaactatgacgacgcatattagtaccatcgggactattctagtctgttcgactaaaccgtttgtatgtctgggttgctccttgcagcacaacgaagtagctgaagcacttatctataccgtagataaatatagactatacgcgcattattgtcccgagtgaaaacgaacaagtgtgaccaacaccgatgcaggtcaaaggcaaccttgtcacggtacttcacttccaagcgactgtgccacaccaaataggttcgtgctcgctggcagtgaaaaaaagtaaatgcattaacaagcgctttgataatcgcttgaatcctctttttaagtaatacgaacgctgagtcgatctacagtaatccagaacttcttcgtgtatgcacggcgttagtgcaatgatggacgtagttggagtggctggctagaacagttaaggtagcgctaattctacgggtcccattttttttcattatacagcgcgttgatcgcagattctgtaataaaaaacgcgaggcgctcgagctaatgagacaggtcggggtgaaggctacttctgagcagctagatattgtttgtggcttgctctacgactggcgaaagcaagtcgacgccgtattcaccttcacagcaacgcagtgtccaagaccataaagggccaaaggcgcaaagaaatatttcctggcatccttgacgttgtcattaatatgaagggcatgcgtcgcctggaagcaataagtataagactgacatattaccaaacgtacttgtactgatatttctgtaggtattgtcaactacagactttatcgagttcatgcagcagattcatcccgagtggataggcacctataataacgggacgactgacggcgaagtagcactcgaacccatggtgcctggatgcactcttccgtttgaaagatgtatgtagagaaagttcatagtttgaaatagacaggcctgcttcccttcttgttgacaactttgattatcgttttgggtctttcttttagcggtcccatatctcctacatctagaagctgacacccagcagggggagggggggacaatgggaccggcatggcattcgccacttccgcaacgaaccactctctttctttggagacctttggcagcaatcataattcatgctccttccattaccatctcacggtgcattaatcgcatgtcgctggagcattatattgctggtgcatcattaaattggtcagcacacacgtacgaccatttattcgtaccgaggcattaaccggccgtttttatcagcacgtgcggtttagcacaaactgttacacaaaaggcgtttatgcttgttcaaagtaacgtcatcgctgtgtaccaaagttcgactatgtgatatcgaatcgagtgtggcgaaggggattaacaaaaaattacgtcccaaagtaccctactaaatcatgacggcttggtgtcgcggagaacgatcatagatactagagcaatggatggtcatgatcttggctatacactccgcgacatattatataacccgggggcgttttcactggtagctcagctaatatttaggactagacgacgctgtttagatatgtatctgttgttattgatagtaatacggggtatgtgctaacgaatgcaacttcgcagtttgcgggggacttcctatacaattttccactttcaccgccgcgacagtttagatcacccacatacactatacaaaaatcaagtataaatgaacgaaggtcgatctgaaatgaacggtcggagagggtggtcgagcggcctgtcgtccgtgcgagacgagggtggcgcattgagtgacgccaccacccgcctcacggtttgcgcgcagcggccggtcttggctgcgattgcgcgggcactgagtcctccttcatgcagccccgcaatccgaccccgttcatggtccgacaggcggggcttcttctgtgccgaggctgtcttggtcttcttcttgggtacgggcttcttcttgggcggcatcttgagaagtgatgccttcacctcacagcagacttgtgcgctacgtgtgtctgcatgccattcatttcagatcgaccttcgttcatttatacttgatttttgtatagtgtatgtgggtgatctaaactgtcgcggcggtgaaagtggaaaattgtataggaagtcccccgcaaactgcgaagttgcattcgttagcacataccccgtattactatcaataacaacagatacatatctaaacagcgtcgtctagtcctaaatattagctgagctaccagtgataacgcccccgggttatgtaatatgtcgcggagtgtattcagcgcagcatacacagctatggaaattaatatatgtactacacaatactagtaggtacaatcctgccagtttaagctacaaggccgacaagtgcaggtaccacaagttatttgccgtggaacttcagctttagagatggcatacgacagttccattacttttcgctcgaacggtccgaaattcacagttcttggtcgcatcaacttcagcattttttgacaccacaacagctggtccgcttgcatacttttgcgacgagccagtcgctaaactcgggacgaatctgccgtgggcgttgggatcgcactgcgagatgaaaggtgaaagctcggatccatcgcctgacgatctgccggaagttaaggacggatagaagccgcgagctgttggacatcgttgcccaaccactacggcgctcactccgcttgatttatattggttactgctactgtatcccttaacacggcattaatatcgtccagttcttgcaatggcgaataatcgttggataagcaatcaattcttgattcgacagggtgagaatgagccttgagtgacgtgcgactaagcgacgaagcatgctgtaacggtgggctggagggttgttgtgtcccccaaagacgtgttgagcgcgtgggggttgctgcctctgaggtcgccggtctggccggcctgggctgcaccgaccaaatcttttacaaggttccagcatactccgaccacattattgacgaccttccaagacaacagatcggatgcggcgcgaatgaagactcaggtaaaggttgttctgcgcgcaaccgattgataagggattgcatccgtcctgctatagtaaacagtcagagtagcctgtatatgggaagagtattggtaaaatacagagagtaggtaatttgttattcaatagagcgttcgtttcgccttgtgcgacaagagtaccagagcaatccgacgaagatttcgggattagagctagaatcctgctgcgcgtgagcccgctgtgtatttatctacccagtcttacgggctgatcacgctgggggttggtgtagcatcttcaacagtacttgccgatgggaagtccaagacttaacgtagctgctacgtcaatcaaatctgtcggatccagcgacttgatcaatcgccgaatgaccggattgctgccgtgcgcaccgggggcatattccgagaccgagagtgcgttttctgtctctccataccccctttaagccgtactcgatctagacacaagcacggcgtatcgaagaaggggggatatggcgaagaagcctcgagatagagagagctgtatggagagcacgtccgatggctgactacttcggagacaacccggcacatgaaatcagaacgtggtgctcgatgtcgatctgcgtagctctgctcggtgccgccgccgtcagtggcaactccgcaacagctcctgctgccgatgatgccccgccgctggccacgctctcggtcttcgcgcacaacgcgacctcgttcaggtgcatcgcgtgcgcctttgcagcgccgcagattgcagacctccacgctcacagctgccggcagcaccgcggcaccacattcacggacgtgttccatggcggatgcgcctgtgccgcgtcgttcgcccagcgggcagcggcaacgagacacagcctccgctgcggaactgcgccaagcgctctgggcgccgcgcgcccgacgcagcaaccagcacctgcagacacagaggcggctggaggagggcccacggtgacatgccgtaatcctcccccagactcagccatcactaacacttgtccctctcggccgtggcgtgcgcatcgttctcgtctttgtgtgcttcctcgcgccacaggtttcctgacgacgaatgcctcgccgaccgaggcaactgcgccgctgagtggcaacaagcgccgacgtctgcaccctccggcagcgtcgactccaactcaagatggtgacatggaattgcgtgcgacggaccccgtggacgtctttcttcgccgaatgagggaatattcgcccgagaccagctcggctacgacctcaacggagacagggacaaaaacctgcgcaccgaccccagctgaattaactataccgcctgcaacaacgacagcggccatgggccatggcccatggccgccacgttgacgaccccacgtaccctcgagcctctgcatatgccctcggcagcgggagaactgctctctaggcccgggacggcgccggatgcgacctcggtttcctgcacagtgactgcaaccttgacagacctgctggacacgggtccactagctaacctagcggcggcaagcaccgagaacccgccgtgtgcgcccgtgtatgcggacgaccgagacgaaccgatgcagctcttgccggccgactcgacggcctcgcgcagcacggatgaggagatggtgcccgtgccgacgtgcatcgcgagggtgcccgagcctgcaacaacgacgacttcgacggatagcaacctggagagacctgatgacttactgtggacattatactttgacggagcgtgccgccaccggtccacggcgattggagccgcccccggtgctggtgccacgctgtttgccggcacagtgaataagtggacttttgctcgctacctggatagcacgacgcacactaacaacacggcagaatacatcgcgctcatatcaggactgactggggccttgcatcacggtgtccgccgtctcacggtgaaaggtgatagcacactcatactggagcaggtacgcggacgctacgcttgcaacaacgcgcgcctacggcagctgcgcaaccaggcgcgtcgcctcctacgccgccttgactactatgagctggtacatgttgatcgactagagaaccgagacgccgacagactggcgaaccgagctctcgatggcaggcgcactcggacagagtgcgctacgcacggaatggacggcgatggctgcagggggcgcttaacttccgaccgactagcttcaggatcgcgagcaggacgtgacgctgagcctcgtgagcaccccgtcgatgtggagatggagaatgccgacgatgaagcggcggctactgctgctgctgacatcgtccgccgcgatcgaggacaaacgtttccagtgctgccagtcaccgcttacagcacgccgagccgccagccaaggttgaaactgcggaacaacttgactgagcgtgaactcgaggaagcacatgcagcggtacagcgactcggccacgagttcgcggacaagctcaccgatgtggaggactgggaaacagccgaaggttacctttccgcgctcacgcctacgctgtacagcacactgcttcctttcgcgcagcatcaacgcccaccacgtcgacctcggcgacctgccgtaaacccagcccgccagcggggtcgccgcagacctccacggacaccgcccaatgaacgactcaacgcggccctggaccagttggagagcctgcagacagcgccatgtccgtcgcagcccgccatcaggaaagctcggcgccgtgcaggttgcatccgctcggcgatgcgacggacgtcgctgcgtaagaaattccgaacgcatgagaaggcatgcatgcagcagatattcgctggcgcgaaagctgacccggagcatgccggtggaccagcggccccgacgagctgcccgatacccaagtcgacggtgcacgagtacttccagggtgtgaatacgccgcagcaccagttcaacttcgacgacgaggccggcgagcccttccgtcaattgctggcggcgttgccaccggcctctgcggcaatggatgcgctcacatcggtgattgtggccgatgaagtggaagacgcagtgcatcgcgcgcaggcccgctccagccccgacatcgatggcatcggccatgacatttacaagaccttcctgccggaactgctgcctgcgctgcacgctgccttcgccgtatgttggaagcacggcaaagtgccggctctgtggaaggttggcacggtgcagctaatctacaagaagggcgacccagagagccccggcaactggagacctatatgtctacaggcgtgcatctacaaactctactccgacattctggcgagacgccttgtgacgtggctcgacgcgaacaaccggcttaccgacgcgcagaagggcgttcgcagcgtcaatggatgcgcagagcacaacttcttgagcacggcggtgctcgaccagacacgccgacgacccaaacctctccacctcgtttggtatgacgtaaagaacgccttcggctcggtgccgtccgagctcatctggcgggtgctgctgctgctcggagcggacgcctcgtacgtcggacgcctgcgtgacatctacagcggcgccgtgttcacagtggcgaacgcagcggatggcgcgacggaccttattgagctacgcatgggcgtgtttcaggggtgccccctgtcgccatatctgttcctggtcggcatcatgccgctcgtgcgcgcgctgcaggcacttgcaccggagatcggcgtcccgatgaccaaggaccggaagctgtcggtgacggcgtacgctgatgacttgaagacgtacagcacgtcggaggcggcgctcgtctggtcgttgccgggcatgggcatggcgagcgtggaggcagcagcacggttatcggcagcttggtgcgcgtcagcatcttgaccgccggcggcaacttggtcggcagcagcttgatcagcatgggcggctgtagttggaggtgctgcctcgtcgagcacgggcatccagtccacggcggcggcgccctcgtccacgctcactaagtcgctggccgcgtcgctaaagaagtcgctctcgacgctcacggcgtcgtcctcttcacgcgccgtcaccgcgctatacgctatgctgctcaccggcgacgccggcggctgcgaaccactggacagcgagaagatcgccatcgacacgcgcaacccgcacgcagcagacacgcagtagaagcaggttaggctccgaagaagtgtagttgcttggaagaggagggtgggggcggcgcacgcgctcacccccgctgacaaaaattctactgtggaattactcaaaagagcattcctgaacccttacagcaccggagtgcaaggggcctgctccggctcatgtcaacgccctcattgagcagcgtcaagcaccagtcaggtaagtatggtttgtggtagaaatggagtgcacattcctatacggtggcttgtccctcgcgaacatgtggtgtttatcggtttcaaattttaattttcgtggaaataagtgaaataaaaagcattcatagcgacaatatcaattctgcttacagtgcgcgacataacgaaagcctggttgattgatacctcgaatcactagtggtgtctgattcgcaaacctatcttcttcttatagcagtcggacacttaccatgggcgagtctctaagcggtcgacttcgcctgggcgctctttttcttctttgacttgcgtttcttgactgtcttgaatccgtcgtcctcagtggccttggcgactgcatgcgttggggatgcagtcacctcggcagccagcgccggtttgctctcgctcgagaatccgtcgcgaaggtagatcttcagagtgacgacggtgtcttccagctgcttgggcgtgtgcagcgccgagatgaagaagcgcagacggcacttaccctcctccaccgcggggtacacgatgggcttcacgttgatcttgtgcagcgccaggaactccgaggccttggcggtcgcgatggtgctgccaatcatcaccaccaccaccggcgcgccgcggaaggtgttctcgcccatcggaatcttgtgctctttgcacagatcgtagaaatacttactccgctcctgcagcgtcatagtgcgcgacggaccttccgtcataagctggacagacttcagggcagccgacccgcaagccggggccaagccaaccgagaacacgaagccaccagcgcagtgcttcaggtacttgatcagtgtctgggagccgaggatgaagccaccaaccgatcccaaagccttgctcatggtgcccatgcgcacatcaatttccttcgggtctacgtcaaagtgctcgcaaatgccacggcccgtagctcccatcgtaccgaacgagtgcgcctcgtcaatgaagagcagcgccttgtacttcttcttgatgcggaccatctcgtgcacgtccgggatatcaccatccatactgtacacgccctcgatcacgatgagaacacgacggtactttgtgcgcagtttggacagcatacgctcgagcgccttggtgtcgttgtgcgggaacggcaggatggttgcaccactgaggcgctggccgctcacacaggaatcgtggttgagcgcgtcgcacaggatcaagtcgcctttggacaccaacgcatcgatcgtcgtgacattagacacccagccgccgacgaagagaatgctggcctcggcgttgaaaaacgtgcacagcgccttctccaagtccacattaacctgcgtctggcccacaatcggagacgagctcatagtcgttccgtactcctcgatagccgccttcgacgcagcagccacctcagggtccgaggcgtttccaaggtagttgtacgtgttgaagttcgtcatacgacgcttctcgggtgtgagcgtctccaagaaggggacgcgcaatcctgcactctcgaactccttcatttggctgaacagcccctgtacctccgggaagttgtcgatctcgaagcagcttgagtcgatctcctcgaccgtcgtagcagtctgcgcgggcccactctgctcgtcaccttcgtcgccaccagcaaggtcgccagacgcaaggccaggagcattcgcaagcttgaacggcgtgtcgtactggaagaatgcggacggagacacaatgcagccaaggaattcacccaaatccgaagacagtccaacgatcgccaccgaatccattccaaacatcgcccacggggtgttcgggtcaatttcggccgggttagccgtctctgacaccgcgttcgagctctctccgtcgccaaccgccgttggcacttccatctcctgagccacatgctcgagcagccatgcgagaatttcatcgggggtcttcagctccccagacggtttgtccgagttggtagctgcagccttgatctcagttgcctttgctggtgccggagaagacaagacttgagcattgcctcccttcgccttgtactcgaacagaggcttggtaagcgttcccgccaggaaatgggccttcgaggcactgcgctggatcttgccgctcgtggtcttaggaatcgtcttctgacggagcagcacaatcgcctcgcacttcagctggtgctctgagagcaccgtcttgatgatctcacggcaaatctcttccagcgtctgctgcgacgatccattcttcacctccgcaaccaccacgagtgcttcctcatcacccttttcaatggaaaaagcggcagtgcagccaggacggacattttcgtgagcgtgctcaacagaggcctccacatcttgtgggcacacgttacggccgcggataatgatgaggtctttcagacgtcccgtgacgaagagctcaccgttgcgaaggaaacccatgtcacccgtgcgaaggtaggtgttcttcgagttcttctcgccggcgagttgtgcgcggaacatctcctcggtatattcggggcggttccagtatccgaccgccacggacggaccctgcacccagacctcaccaacctgcagctcgtcaagcggcttcttggagtccgggtccacgacagtcacattgaacgtcggcatagccttaccgcatcccacgagctgcataacgtcgttggcagggggctgcttgcccttcttggagctcaccacggcgaccttgcgctccgtctccaaaatgcacttgtgcacatccagcagcgtcggcttctggggtggctcctggccggtgcacaccagcgtcacttccgccaagccgtagccgcagttgaacgagttggggtcgaatcctgcagccttgaacttgctcgtgaacgcgtccagcgactcacgacgaatgggctcagccgcgcagatcgtctgcttgagggtactgaggtccatctcggcagcctgcttgtcgctcgtctttctggccgccagcgcatagccgaagttgggcgcgcacacgtgcgtggccttgtacttgctcgccgtccgcatccagagcgccgggtccttgatgaagctgatgggcgacatgctcacacatctcgccgcggtgacacacggggtgatgatgaagccgaccaggcccatgtcgtggtagctcggcagccagctcaccatcgtgtctgtgggcacgatgctctcccacgttttgagctgcgctctcaggttgccgtgcgagatcatgacggccttgggggccgacgtcgagccggagctgtactggaagaaggccacatcgttgtgcgtgagcgacagcgcgtcctcctcgtcgtactgcgcgaccagcgagtccgccaggctgtcggtggtgatccacttcaagttggccggccacgacgtcctgtccgtggagaagtagcccttgaccgtggccatcttgctcgcgaggtggtacgtcgtgttggtgagcacaaccgcagccccggagtcctccaccagccggttgaacttgggcagatccttggtcagcgtcccggggtacggcgggtacacggggatgcccacgacgccggcgtacaggcagccccaaaaggccagcgcgaagtccaggcccggagggtagcacagcatgaccctgtcgcccttgacggcgccggcgtcgcgctgcagcgccgccgctatcttccgcgccgcgcggtccacgtcctcgaagctcaggttcacggtctcgcggcccaggtcgtccaggaacgtgtacacgattttgtggcgccacttgtcggacgccgcgcggcgcttgagctcggcgaccacgggctccgtgttgacggccacgccgttggctacgaccaccggatgcttgagctctgcggccgcgtcaccagaggggcccttcttcttcttctggcggcgcttcttgcgcgcgggcgtcgacgcctcctcgggcccgtgctggcgcttggtgcagtgtgcgcctagcgcggccacggacgccacggcggccagcgatgcggccgccaccacctcgaaggccacgtcacccacggcgttgacgagcagcgacgacattgagagcggggagggaggggctcaactaggagaccaagcactgcctgctcagctagtcgagggaattggcgagtgtgtggttcaaagcgcggacgctgagcgtcccgcagttgcgctgggggctcttgaggtttgtatgctcggattttggtctagttttggccaatagagaggcgacagctagggtcgtaacggtatcagatggtgctttcaatacgcattgcaggtttgagagggatatggacaaggtcattttgatttcacttcaacttgctgttgttattacgtatgggtccttttcaccgcttgtgcagtcggctgaacgtcggcatgttggcgttccgcgcggcgggcggcggcgacggcgacggcatgggccccgcgcgagagtgagaggactgcggcgcagcgagtctcggcagcgcggtgctggtccccactaccattcctggacctccaggacgtcgcgcagggagcgcgttgggcggcgcagtgttgcgctggatcagcggcagcttgttggtgatatgtccgggtgctggtcccactgccagattcgcgcgctggcccggtcccggtgcttgtcgtgttggtcctgctgctgatactcgagctggggctgcagagcgtgctggtggtaatgacgacccgccaaagcgctggaccgatgaggcggtctggcgagtgttcgccccaatcactgcacttcgcgtgaacgagcgctggttgcggctagctgttgctgtcgctgttgttgtgttgaaccggccactgggtctgctgctggtaggtggcaggcgctggaaagcctctttccgcttggtaaaacctttcttgatatcgtcgagtttctgaagatgcgggtttgcgatgcgcttgccggaggccgcaccaagggtaggagctcttactcgtggctgtggaggtaaccgctgcttgggatttcgtgcagaagcagcagttgacgactttgttgttgctgctgctgctccagcgcgaacttgtgaggtggcagccttgcgctggtttgcagcagcacgctttttctcgagccagccttcaataactacatcctgcttgcgcgactgctctcgcgcctccttcgctttctcgttcttgaggaagttccgtcgctcacgctcggtcattcgtcggagctgccgttgtttgctctccggaaggctcgtgaggaacgtgtcgtttttcgatttcgagcggttcctcgcgcctgtgttgctaccattaagcgtacgcttcttggcattcgccgccgcagttgctccctgggcccgacgcgatgatgatactgtagttttatctctggcgcgcattttggtggctccagtgaccgcgtacaccgttttggaaggctcatgaagtccaccggtggttcttctctttgcaaaccggagtccgttggcagcggcctgcttcgggcctgctgttctactcgaggtattgccgtctcgcgcatcgtcgaggtcatcaaccgcaagccccgcatcttccaggtggcgaatgcgctgctcaagctccatcagtttatcgaggctggtcaccacattggcattgtccaaggcagccttgccccctgcggccatcgcagcgcgatggtaaacactgttgctattgcctcggtcgtgcttgtctgggggtgctgcttcctcgtcttggttcgaaccttttgcctgcatcttagatcggctggttacgctcccattagcttgaagctcccacatcttttcgcgatattgctgacgccgtcgctgcatatcctctcgctgtgccatcgattccttcagcttccgcaggtgctgaatgtgacgctgtacatcgtcatctagcttcgcttcatcgcgttgtcccttgacctcgaggttgcggaaaaactccgagttgacctggagcggcttgagttgctcctcctcaatgatctgctgcgctcgttgcgcgcgctcctcccgctcgccctgcgtgagggcgctcgcaaactgcgtgtcttcttgcttgatcttgttcgttttgataattgcagccttgagagctgcttcgttcgcgagcttgtgccagttcagcagcttcatctcttgctgcagctcctccgcttgtgagatcggtgccgccgaggcggcactggttcccctggttttcaatttcctgctcgtgttcacagctccgttgcccccagcgcgagagcttagcgccaccttggagggttttccattatcaggcccagcggcttccagccgctcgtcgtactggccgtcgttgttggactggtattcatcgagctcacgcacccagcccgagtagtcagcggctaccgccattggtaagagctcacggctgcgagaagaacacgacgaccgagcgtagtgtttgaccgagacgcactggattgaccagggcaatgcacaatcatggaaaacaggaaggataagggcgccgtctaaatagcgatgagggtggtgccctcgcccccttgctgtttttagccgggcatgcctcgagtgagacgcaaatagctgcccaatccactgcattcattggaacgagcatgcatgtcttgctgcactgggcgctgcatgtgctcagtcgagcctaggccttacattttcgagcagcccgaatggagcttgacgcttcgacaatcgatcgagtcatgccgccgttgttttgatacggtgcgcaccaaagactttgatcccaagtcgacgtcaacactgcatacagctccggctctactgtggatgctcacgcttggggcgaatcttacaataactcgagcgaagtcagtgtaagcggtcgaatctctcagacgcgctgctgtggctgaggaaacacagccaccgctgaatcgtgcacccatgggcacctgagccgagcacgctccttgatgccaagcctttgccggtgctgcgtgggccgtgatggttcgcctgaaccgagcacgcgcttttgttagtcggcggtttcgcggtgcctcatgcatgggccggttgaagctcaggcaattggctctgcagccctcgggggcacgcgctgatggtatcacgggtggacgccgtcgaagcctgactggactgttcaaccgcaggtgtcgacaatgcgggacgccgtattgtgtgttctgttcaaaaattccgcgggcggtttgttgaacgcccaagccaaatctccgaccaatctccgtggccaccaggattggttattggcacccgtttaagtacgaattggtcttgactgtagtaacgtactgtacactgccgcgctttatcaacacggtggcggcgctgcaaacaagaatctcgtgggcagcaaatgccgcggtattcgtcgtgcaagcctctcttttggagggcgaatctgcacattcaccagccgcgataacgcagcgttttagattcggacatctgacctgcgtgtccgcggaggacacatgcgacagtcgcaaagacccagcttgccgcatcgagtggacgtcaccgggccagcaacagactgcagacctagaagggccacggtgctggctggccaagcagcgccaagaacagctccgcagcacgctgagcagagcacgcgcctttcggacagcggcagctccctctcgggtgcgatttgatggcgccacgccgaacgccggcacggtggcaggaagagctcgctcttcctcgcgcgtggcgtcggccagtacggtagcgctgccggacaagcaagctgactatgtaacgttagttggcaggtgcgttttggtggtttgcattgctaaacttcaaaaatggcattttgctagccgcgccgccaacagatatgctaaactcgccacagcggtagcggcctggagagcatcccgcgcgcggcgcagtggccggcatttgcggcgttcattggcttgctccgagccgcgttgcagcgtggggcgcttcaattgggccggtgcttgccgtcgtcatgcctgcgcttggacggcccgttctggtgttgcaggggtccgtttcggagaccgtacatagtgcgcgtctcttggtctccggtgcgcccattggccaaaattgccacgtagacgaatcacggtacctaagtggctacagcggacctcggacgtgcccaatgagctcgggcatcggcccaaagtggcatttccccgttttccgagggctggacggcttcgatgccggtcaggcattcgccaccgccgtcgccgtagcgctctctcaccgcccacttccgcatttggttcgacgcccgcacgcgtgcgaatctaattgggcctcgccacgccagcgcgaggaagacaactcagtgcgactgctggccccacgccgtccggccttaaagcttccgccctcgctcaccgcgcactgcccctgacggcgagatttcgtccgccacgtgaccgcgtcgacaacctccggaaacgccacaactcaatccgctgcgctgaacgaacatggccgccaagacccagctcgacttcatcctgaaccccgtggaggccgccgccgccgcctcgatgcagcggctcgcgccgctcctgccggccgccgccacgctgctgcccaggagctgcgacagcctgtccccgacgacctgggcctcgggctcacccagctccgtgtccgcctggaacggcgagcaggccgcgctgctgcgctcgcccgccacccccacgctgcgccgcaagcgcgacgccccgcagctgccgagcctggtgctgccggcgccctccaagaggatccgctgcgccggcgcgctgccctcgatcttcgtgcccgccgtgtcctcgctgaccttcgacagctgcgcgtccgcagccacgagctccgagggcgagacttcggacgccgacctcagccccaagcagggcggcgcggcctcgcacaagaagacgcgcctctgcaaggagaagggctgcaccagcctggccgtgtcgcgccgcagctgcgtgcgtcacggcggcggctcgcgttgcaccttcgagggctgcaccaacggcgccaagctgcgcaaccgctgcttccagcacggcggctccaccatctgcctcgcctcgggctgcaacagcaaggccaagcgctacggctactgctggtcgcacggcggcggccgtatctgcagcgcggagggctgcgtcaaggtggcggcccagggaggctcgtgctgggcgcacggcggcggtaaccgctgcaagctcgagggctgcagcaagcgctcgtaccagaagtacggctactactgcaaggcccacgccgcctacaacgtgtgaggagagacaccccgcccgcgcgcggtgcctatttatttggatgaagagtattgaagacgaggaatctagccaagttggtagctgtctgtctgcacgatgaacctagcttcccgtagcgttttttaagcataacatggtgcaagttgtttgacacgcaaaacctggtccactgcgcgaacacgatcttcttggcccgcaccagaaagcagcgatcttatcatgagtctcatctacgggggcagcgtcacgagcgccgagagcctaccagagaccgtggccggcgtgattcacgcctcgaaatcatcccgccgtgacataccggttcgcgctgttaaacgcgaggcgttccacacaccggaccgcatcctccttttgttctcgaccgctgcctgcatgcatgcgcgctaccgttgccgccatgatggcggtcgcgcagtgccggtgtcgccatgacgcgacgacattcgggccccgattggtggcggcgcccgctgacgccccagaaccatcacaccagcagaaaccagccaaacaccagcgaccgcacggcctgcacgactcaaatgagcagcaacaagcatgagtgtgtgtgtgttgctgcttgatacactgtactgaactctaccggttcacgcgcttgatttgccagcgaaccgagcacctcttgcaatggtgtcacggcccgacaccggactccgatcgtttctgaatcttcagaagtacacattggagcgaaagactcgaaggaatccttccggcacaacaggctagcagatccacgcagccccggccggccaaggcgcggtctcgagtatcatgcatccttcgagcagcgccttgcccacggacaatgcccgggaagaggagagcgccgtggcgttctggtgcatcccccgcggtcagttcatgctggaagtgccgtcttgtcgctgcgcgtcacgggagctgctcgggctttgcgcggcctgaagaaccggcacgggcgcagagagcggcaggagggtcccccaggccaagacacgggggaccctccttggcaacgaccttgcggcctggtggcaacgcgcaggtaaccttctccaggccccatcgacgcagccctgcgtcgacgcgagcatctacatgaagtggcggtcggtgtgagcaaaactcgcttgctcgctacgccggcaagattctcgcgaaattcgagacgaatctgcacattcaaccaccgccatcgctgctgctgctgctgctggcagcgatggttgttgccgctgatgcagccctggtttaacgcgcccgttcttgatggcgccggcgccatctgcgttgaagtggcagggctccaccaccagcacggcagccgttgccggcccaaaggcgacgtcacgccccatccccgccgcgccggtgagcgtcacgggcgacttcggctcgaggattggttgttgctggcccggcctcgctcggtcgagcagcttgctttgcggggctcactttctcctctcgcccggaccgccattccccgattgaagcggtcttactgaagtgcctatagagacccccctccttccggaccaacatgccgcgcgaggacgagaacaaaacagcgctggccttcatcttgaacccctcgtcgctgcacacgccgtcgcacggcagcagcagcgcctccgtgtcccccacgatgtcccctctcagcaaagcggacatgggcatggccgactcggacggcaacgaggacgagaacgacgcggacgtgaccgacggcggcgcgcgcctctccgggatgcacatcggcggccgcagcctgctctcgggcaacgccatcatagagaagcgcgtggagcagttgctggccaccggcaaccaccacggcaagatgcgcgtgcgcaagtcgtccatctgcgcgcaggaagagtgtcctcgagctgccgtctcaagaggacgctgcgtgcgccacggcggcggctcgcgctgcacgtacccgaactgcacgcacggcgcgcgcctgtacaaccgctgcttccaccacggcggctgcaagctctgcaagatcgctggctgcaccagcaaggccaagcgctacggctactgctggtcgcacggcggcggccacatctgcgacgcccccgggtgctccaaggtcgcggcgcccggaggcttttgctgggcgcacggcggcggcaaccgctgcaagatagagggctgcaaccgccgctcctaccagaagcacaactacttctgcaagcagcacaacgcctcgcagtcggccaaggcgccgtgaaagagagggcgattcgttcgtgacaccagacattttatgagcgcccctgggggctgcatacacgttggttttgtgagttgtaagagtcaataaattattactgcgatcactcagtcagcgctctgcagctcacagcatgtcgtcggcatgacagcatgtcgtcggcatgaccagcatgcttctccaggtttctgaagtttccgatggatcgacggcttccatatttcatagaccgtccggcgaaagcggcattcacggcactctgtctcgcaatgcgcaaacggaggcttgctaccatgaacaaggcacagtagacaccaaaagctcacggccatggcagtgcactgtgatctcttcttctctccgtcccttcgggatcatgctggattgctggcaaatcttgtcaactgatcgtccagctggaatcaacccaagttgccccaagttgcagcaacgtagagcaactgttgctccgcgcagcttcactccgaagctgcctgccaggggctccgctgctacggttgacgtgtccatatgagctccggtactgtacgaagagaaagagaatactgtacgtattaccgcagtcacctatttgtatcctagacttggcacgattccggtgcaatcgcatgtaataatggaaacttgtttgtcgggtgttacacgatagctctcgggaaactagccgccaagacgccgcgctgggcgtagcctccgatggcatcaacacaataagaaggtgacgagggccttgcttcactcgaagttatcgctcgtattgtaccaactttgcggaatttcaaccactgctttcctcccatctacggcaaaaatagggggcacacgctgctaccaccaaaacggtgttccccgttcagtgtgattgcagtcgaatcctgtgaagatttggtagaccagatacagtcaaacctgtttatatgaggccctgttggtgaccatctactacaatcactcatataaaatggactcagttaaaaaaattatgtggtgcacgtaaagaaatcgtgcatagtttgctgccgctttgccttcaccgtagtctctcgaaccaaagcggtcacggtctgtaaagctcttcgttctctgtcagtctgctctccgcattgcagcagaaatgcagccagctccatgcagtatctcagagcaatggcaggttgaactgcgggttcctgttcctcctattcctcctgctcgtcctgcgaaactgcatcacttcctgccgcttcgtccactagcacatctggctcgtgcacaggaacgtcttcgtccactgccagatactcactagcgctaacagcgccctcccacctcgatagcatcgccgttaactcctccatctcgttgctggatacctcctcaatgtaatccgtgtcaccacgggtccttcctagcatctttcctcccaaaatgcgagtcttgacccagcaatttgtaattgtcgttggcgtcacacccgcccaagcatcaatggagaattggacagcttccagtacgttgagcttgattgtaattttagcttcaagtgcatccaaacaccaccgcacaaaatactttcggtaccgagccttgaacgaccggataatacctgaataaaaaaacaccgtaatagagttggttagtttaggctacaccacaatatagataaaatatttacctgcatccagcggctgtacggcggatgtcatgttaggagggaggaagtgaacagtcacatgagtcaggtttcgtagaatcttgtggcatgaagcattgtcgactagaagtaggaccttgcgattggcggccgccattctcatgttgaagaggtgcagccattcgtcaaaaatgacggatgtcatccaggcgttcttggaggacttgtacaatataggtttacctttaatcgccgctccctttttaaagcacctcgggttcttggccgtaccgatgactattgggtcgagcttgtcggagccagtcgcgttgcagcagaaggctaaagtcaaacgttgcttctcctttttcttgcccttgcgaatagtcgtagctagcgttcgattaggcgctaagcgatagaaaagcgccgtttcgtcgaagttgaacacattctcgggtgtaaactgcaccaccactcttgtagctctagcctcgcatctcgcacttcatcagcttctacagcgccaccttcgccgtgtagcgtatgggagcggatcccattgcgcttcttaaagctttgaagccagccgttgattagccggagctgcgtggcatcgatgcctaagcgctccgccagctcatgcgccttcagcaggagcacgtcgtccgccatcgccgttttagcttcgttctgaaagaaaaattccctcagttcccgctcgaactgagggaatttcactcggcgccgcttggtcgcactcaggtcgacgtggctgaagtaggaagaaggcaggttgcgcagtcgggcgagtgtggcacggctgacccgggccttgaaagttgcgtagatccactcggcgagcatggggttgttcatgccaggattctgcttgagctttaggtgcacttggagcttttgttctagcgtcagacaggtgcgaggagacatggcgagcgaagaaggcttgcggtaggcgttgagtgttgagcagtggtgctttgaagagtgtgtggccgtgagcagtgtgaatcaaataaacaggtgagacctaatttggtccccaaaaatgtgactcatataccttgtatgcatataaacagagatcatacaaaaactaagtgaaatatttggtagcgacaaagcctgcatcaaataaacggcatggctcaaatagagaggatcatataaacaggtttgactgtatagccaattttcgaggttcgggttaaacttgtcaggagagggcgacaataaattaccttaccgtcggaggcactgatttttcgaaaaataagagccgccccgcgccccccgttttggatggcattcgtcgatcggccccaagagagaaagaagcaagagtgaaggtccctgcacaagaatggcgcacacaactggcacggtacgcttacatgcgagtcatgggtaaggaatatgtgttactgacatttgcttctattagcctggctcgtcgaagcgccctccaggtcccgaagacgcccatgtgacgcgtgcgcagcgcgacagtgctgagtcggagcggagtcgagtcggcagcgccagcgcgaacttcggcatgaaacggacaggacgctgcgcgatctccccccgctgccagtgtacaatcgcggtgtgctggaagagcagcgtgccgcgattgtgacgcgcgcacgccgcgacgagcaggagatccgactggcgatggacgggaggcacaaacgcactcggagtgctaccgccatgctgcgaagtgaagatgggaagaaggctgggcagaaggcccgggatgaagcccgcgagcagagcatgtacgagcggtgggaagcacgtgccgcgcgcgagatgttcggcatagagccagattcggattctgacgacggcgcccttgccgaagccatttccgctttggacgaggccgacgaagagctgtctcctggcggcacggacgactccgactacgaggagaatcccctgccgttcggcaccgacccagacgccagtgacgaagatgacgaagacaacgatgatgaagagcgcgaatcggccgctgaaaacgacggtgatgagagcgaggatgctgacgaagacgacaaagactggcgtgggaatgagggcaacgtcgaagaggaagaaggtgacgtcgggagtggagaccgcgcagacgaagtggacagcgaggaagacgacgaaggggacgagattcggttggtacccgaaccgaaatctcaccgaagttcgcaccttcgcgtgaagcgagttgtgcctgtgtggttctacggattcagcaccacgttcgactcgtgggatacgttccacacctcgttcgacgacttccaggctcagacattccagcagttttccatgcgaacaagtacgtcagttttcctgcggaacaagcaaattctcgaaaaggacaaggaaaggaagcgagccgcaaagaaggcccggaaaccgatcaccttggttccggcggaatgggtgacgtactcgaaaacgctggtctgcacgcatggtcagcccttcgaaccgaagggcaagggaaagcggcaccacaacaacgttcgcgacacgaagtgcaaggcgagattgaatgtgcgtgtcgctgccacgttcagcggaatatggcgtttacgcgtgaacgccaccggcaaacacaatcccgacttgaacaagcatctttgggagagctacgcggagaaccggacggtgaaggacccgcagttgacggaggatgtggcagtgctgcataaggctggggcgaacacgcacggcatcttgcaatacctgcgtgaacgtacaggtaaagtcttatcactttctgtgtgattttggtttgttcctaactatttgctgtggatatttggtggtatgttgtaggcaagaaaaccacgtccacaacatggtgcagcgatacaaactgaccgagcaagctggtcttactgatgcgcaacgcgcatttgcagtgatggaagagttttgtctgcagcacgatggcaactctgctcaaattcttgtggatagcgactccaacgttgctcgcgtcgccacgttccagtccgcaagtatgaagcgcttgttcaaagcatttccggaggtaattctcgtggatgccatgcacgacacgaacgtgaaccgctacaagctgttcagcttcgtagtgcacgacgtgttcggaaaggtactgacgtagacaaggtttttgttgtgctgtactttaatacactattctaaccttatcatagggtcaatatgtccatcatgcacttgtagacagtgagcacaaagacaatctgcgccgagtgatggagatcttcaaagcaaacaaccctgactgggccaaaatccaagtggtgatgacggacaaggctgctcatgagaaagaagttctgcgagaagagctgcccgacgctcagcaactcttgtgtcggtggcatgtgattacctggctgaagaagcaggctgcacgtctggcgtcatcggtgaagaagtcggtgaagagcctgatgcggttgatggtgtacgcaagcaacgaggacgagtatgaagatgcaaaaggagctgtgttggagttgcttggaggcgatacatcacacgagttgtaccgcacgttcatggcaaactgggacagtaaccaggacgagtgggtttcctacaagcgcggcaacacgccgcacctgacgaacaacaccaacaataggatcgagtccaagtggaggaagataaaggatgttattaacgactccttcactatcgaccaactcctgtctacgctgatgacgctgcagcactatgccgaagagcagtatctcgcagaataccatcgagttgggagccggccttcgcgggattcggaggaccgcgagctgacgctgctggctttgcaggtgagcccgtttgccttcgaattggtcgccaagcagcacaccttggcagccggtccgaacgcagactacacggttgagctgaacacaccaggacgagccactgtcacgagcccaaggtctggagaagtgcatgaagtcaacacgagggtaagctattcaagttatggtatacttttggtctattcagttatctttggtattgacgactgccatgtaatctgtgctgtacagacgaactcctgcaactgtatcttcatgaagacctgcttgctaccctgccgccacgtgatgtacgtccggagtacgtccaacttcgaaacagtactgcccccgatgcactgttttcctacacgatggattgtgcagagtccagaaaacaacatcgactggggagaaattccgtgtggagggttgaagcaagggagctgtccgtctcgagcgaaggagcgagctttgtcgggagctgcgatgtacatcgaagccaaggcaacaacggagaagatcattgcaagaatggcacttcaatctacacccacatttcggatcgcgctgaagtggcttcaggatttctacgaagcgctcaactccggcgacgtggttgcctttgcagagcgcgaggttccggtattcacggggctttctctagtgacctccagagcaaaggaaaccaccaaggttgaagatactggcggaatcgaaagaagtgaggaggagtcctgcagcactgctgttgaagccgatgtggccgctgatggagaaactcaaacgggtgcggaagcagaggaagatggcaacgctacaccctccgaccaaaccttacaagattctaccgaacgcacacaagcctccaccgaatcgagaaagccgtcagaagaacgcccgatggcagtcacgtggacgtttgcggagcgtccagtgatcaatggaatgaccaaggatcagcgaaagcgtgcccaagctagacaagaccgtgaagctgcattggaactggcagctaagtaccgccaacgaaaagtgggaaaattggtttcattcgatgatgttgccgctttgcttgacggaccctacagtccattccactcgaagcctatggttgacgcgcttatactgccccaagttgatgttaccgggccgctgtccgtccgagccttcaagatcgaccaagacattccgtttatcaagggtatccctccgctacccattgtgacggaggctattgacgctatcaagataaggcaggacatcgaccttcttgcctactggccagactacggctacgctacatttgatcagctggacgctatggcaagcatcctggaggcgcgtcagcgattcgcgttggtgatgcgcactacaaagtggattgacgaggtggagtggcgtgttgaagaccttcgcgagccgttcacggacacgagggcaaccacaaaggtaagaaacaattcacagcatttgaactgaagatgcaccaaaactaacaaagtatcttgtgtattgcagaacgagcacaaggcttacgtcgaaacgctcaatctgagcgaaaaatcgcgtgcccggtgaatgtgtgaacggacaccaactgctggacttccgtgagaatctgtggctgcataccacgtccatcttggtgtcgctgatggctttgcgcgatgcttacccggacgtcgtaggcatcatcagccccagctatcacgactttgcgttgccggagcaaaacgcaggaccgcggcaggattcggggccagcgaccctaagaacaagcgtgtcattggaatcattcacatcgagcggcactgggtggcgtttttaatcgacaggacggtcgccaagggcacggcgacatgctttatgttcgaccctctacaaagtcgaagcaactacaccgtcattgaaaaaagcgtgcggaccgtgattgaaggggtgcttctgctaggtggcatggtgaactacgagaaggtggagtggtgcactcagcaggacaacagttcttgtggcgtgtggtgcatcgcagttctggagatgctgctttgcgacgcttcgtgggacgactgcatctacaggttgctgccgtacctgcggctgcgctatctgcagaaagctcttgctttcctgggcaaagaggcagcttgagagggatgagagggtgacttcaacttcaatatacatatcatctgatttcggtattaattttggtgtaaccgaaaatattgtaccaaaattaatttcaaccatcacgaaaatccgccaagtcccacgattcccaaatctagactcgttccgaaaagactgaatctcaatggtgtattttgcttacacaaaaacgaagataaaatagttttcccctagctaatgggtaacatttcgatacgtgtttttgaggaacagcggcgcaccctaaatggtcaaataatggccgtctaaattcggtggtagcagcatcgtccaaaatagggccctgcctgggcccaattcgctattcgagaccaacatgacctcgtcgacgaacacgagatccgatcccgctgcgcacaggcgctcggtgtcgatggacgagcccccgtcggcccacgcgctgcagatcgaccgctactcgctggaggaagacgacgacgccgacatcgccgggtggcaggccaaacccctcgctgcgacggacgtcacccgcctgctgacggataccgatgcagctccgacccacgaagaagatgccgtgccctcgttccgcgatgaagcgcacgctatctggagcatgggctggcaggtgagcgtcacgaccttctgccgcatctcgctgtccaccatcagcacggccttcctgggccgcctgggctcgacggagctggcggccagcgcgctcgccaacgtctggacgggcggcgtgcagatcctcatcttcggcttcgcagtgtcggtgtgcacgctatgtggtcaggcctacggggccaagaactaccggcttgtaagcgtgtggctgcagctggcgctgctcttcctgctggtactgtccgtgcctgtcatggtctcgttcttctacgtggaccggatcctgagcgtcgtgacggatgatcgcgaggtgctggcgatggccgacacgtacgcacgctatcttgcgcccagcgtgctgccccaggcgatttactgtgtgctgaggcagtacttgcaggcgcaggagatcgttcgaccggcgacaatcattagtattgccagtgtggcggtgtcattgagctcgaactacgtcttcatctacggttgtggatccatccccgggctcggatttgtcggcgcgcctatcgcgcaaactgtgtcctcaatcttccagcccacggcgctggtgatatacgcgttctggtacaagggttaccacaagaagacgtggtttggattcgattttcgtggctgtctgcagtgggagcgcgtccgcaccttcgcgtatctgtcggcgggaatgacgattaacctcgccttggacgaatgggtctacaatgtgatctcagcccttgcgggatctctcggcgcgtggaatttggcggcgaacagcatcctattcaacttgtgggggctcattttcggcgtttactggggcttcggcttgccaacgcaggttcgtgtggcaaacttcttgggggcgaaccgccctgtggctgcaaagcgcacacttcacgtcggcttcgttctcggaggcctgacagcgttcgtgtcggcgctgctgacgtacgtattccgcgacccgatcgcgggcttcttcactcacgacccgactgtagttgccgccatcaccagcacgatgccgatcttctgcgcggctgtgttcgtctctgggctgcacgtgatcatgtcggccgtggtggaagcaatgtcgctcgcgactaccctggtggtcatcacaacgatcggatcatgggtcgttatgctcccggcctcgtatatgatgggacttcagtggaacggcggactgcacgggctttggtggggcagtctctggggcgagactgtcaagttcactctgatggcgctcgcgctgtggcacatcgactggcgcaagatggctcgacgcgctgtgatccagtcggagggcgacgttctgaccgaggaggagctggaggaagacgtgctgctgcgctccgagctcgtgcttccctccacacccacgatggcgggcacgactcccgtgctggccatcctgtcaacgccaccgcgcgtgcaccaccaccaccaccatgttgttgtcggcgactccggggctaagaggaatatacggcgcagcaactcgtacggctccgtgagcgcgctccacaacatcaatcgggagcagtaagagtagccttataacccaacaaatgtagccatgtcaagttgaagcgctctatggtgtaggccaccgaaactgaacaacttcaagttgcgatcgatcggccagccttggtgttctacgaatggagctggtgtccacgtccacgtcaccgggcgtcggcctaaaattcccacggctcgagaccacacgtttcttagccgcgttccaggtcgttttccgttccgcgcgtattgatagatggcgaaactccttggatggcccccaccaggaggcgttcgctcgcacataggcttttccccaattccacgccgaaaagataaccctcccttctccccgatccaagagtccacttgctgcccgccatgacggtgcccacgctcccgaagacgctcgacgggcagccgacgtcgaggtggcgcgctgcagacaccagcgtcgtcatgcgggttgacccgcagtccaaggactgcgatcctttgttcaagctcaagaccgccgatgaaaggacgtcactgctgctggacgagaccttctcgtcgatgaaggaggaggaggcagaggagccgctgccgacgttcaacgaggaatcgtgtgccatttggaacatgggctggctggtgagcgtcaccaccttctgccgtatctcgttgactacggtgagcacggcgtttctgggccacttgggatcgaaggagctcgcagccagtgcgctggcgagcgtctggaccaacggggtgcagatgctcatcttcggtttcgcgatctccgtgtgcacgctgtgcggtcaggcttacggtgcgaggaattacgccctcgtgggcgtgtggctgcagttggcgctgatcttcatcacgcttctgtcaattccggtgatgatctcgttcttctacgtggatatagtgctaagactggtgacggacgatctcgaggttctgatgcttgctgacagatatgctcgctatcttaccccgacggtcttaccgcaggcaatttactgcgcgcttagacaatatcttcagtcccaggagatcatggaaccaccagccgtcatcggcgtcgctagtgtcggcatatcgttgatcactaactacgtcttcatctatggctgcggtccgttcccggcgctgggctttatcggtgcgcccatcgcacaaagcgtatcgtcgatcttccagccggtagcgctcgtggtgtacggcttctggtacaagggataccatcggaggacctgggatggcttcgatcttgcagcctgtatgcaatgggaacgcgtgcgcgcttttgtatctctctccgtgggaatgacaatcaaccaagctcttgacgagtgggtgtacaacgtaatctcagcgctagcgggatcgttgggctcggtgaagctagcagctaacagcgtcctgttcagtctctgggggctcactttcggcatctactggggatttggtctgccgatgcaggtacgctcggccaacttcttgggagcaaaccgcccagcagccgcaaagcagacattgtacgtgagcacgctgctaggaggcatcacgaccttcgtgtgcgcgttgctaacgtacttgttccgagcccccatcattgggtttttcaccaaggacccagtcgtggctgcagacatcgacagcacgatgcctatgttttgcttggctgtgttcctgtcaggcctgcacatcatcatgtctgcagtggttgaggccatgtcgttggcggcgacacttgtggccattacgactgccggatcctggcttaccatgctgccgacttcatatttgctggggctcgcttggaactgggggctgcatgggctgtggtggggcgctgtttgcggcgaaattgtgaaattcagcttgatggtgctgaccctgtggcgtatcgactggcgtgaaatggctcgccgtgctgtgcggcaatcggaacgcagcgtgcctgctacgcccgatgtccggccatccagccctacaccagttcgcacgctcttctcggctgcctcgcagcgcgtgcaccacctttcctgcgacaagaagggcaccccctcgaggcggggacttcggcgcatgaactcgtacggatcgacaagcagcacgcacacgagtccagcgccgatccacgccatagcgatttcaccatgagggagggctccgtagtctgcaatagccacactgccacaaccatatcgtagcactagtgatcggcacagtatgaaattaaagttggaagaagaattccaccacaaatgctggttcagtagaagagttttggatgccgttactcgtccgtttgaccctggccacacatcgtgcagtcgggtgagcgtacctctcgtccgttaacttgacgctgtttcacgtaacacgagcaggcaacaatttcaactgcttcaacagtacgttgcagtgtagccatgtgtgtggcccaccaaacttcagaagcgcaccatagcttgtcagttttgtgccgagggtggaaagatcgctttcgagtcgaagttcaacctcatccctcgacattacatatcttattagccccctctacatacaaaccgccatataaactatcccctcacaccagattccctgcagcatcctatatttcgaagcttacgtgggcctgctttagcgctcgcgacccttcacgggcaaactgccgcccacattagcattcgccgcggagccacgagggtgagctgaacgtctctgctcgacgcgcgcgccgctgcttcgaagggcgcaatatacctgagctgctggacgccaagctgcaggtgcagacgcgctctcccgacctctagccagcgctgtgagccaagatcccgaggccatgtacgtgactcggagactgctgcgctccacgctgccccctgagcccgtggaggagaaggaggagaaacagaaggaggtgccgtttctcccgccgccgacgcccaagaggcgcgccgctgtgcgcgcgagtgccaagatctgcgaggtggtggccgacgcctcgggccccgctgctcgtggccgcgcggccaagacatctcccaagcagacggaaaacgggggcgacgagaagaacaaaagcagcagccataagaagatgaaaaaagaggagaagaagcagcagcagcaccaacagaagggggaagatgaagtgccggctgtggacgtgtcaaagctccacggctaccagctcatggtggacgtgcactaccgtggagaggagtacgctgaggccaggattctggacctagacccggacaaagagatgctcttcgtgcactacatgggctggaacgcgagattcgacgcgtgggtcccacttgaagaggtggcggctcatggaagccacagtggcgtggcgaagaagaaggacgtcagctgggacggcgacatcgcgctctttgctactgaggaggaggcggccgcacaacgccagagcaataaggctaaacccaaagcgacgaagaccaagaaacggcctgccttgtcgcccaaggcacgacaggcagcacggaaagcactgcggagtgtcaacacggatcaaaagcggcatagcgaggagatgactgagtctgaagacacagaaccgtcagcgaagtacgtcgtgaaaaagagcccgaagaacgctaagtttgcgaaaaagactgttacgaagtcacctcgtgctgggaagaaggtgtcctcgaagaaggactcgtcctcacccgctggacgagcaccaaggcgtgttcaagttgctgtgggaacgacagatgaagatagcgagcgcaagaacgataccgaaacggcagacttagtactcgaagttgaggtcgaagggtgtgaggcatccaacgacgaagcagaggaggagattggtgaggaggacgaggaggaggaggtgtcttcgagccgtactaaaaagcgtgctactacgaaaaccaagagtcggcgaaagagcgatagtgagagtcctagtgggtccaagaggaaacgagacacgagtaaagatgaagtggaggtgacagcgtcgacgcctactggagctaagtgtagcccagcgaacaagtcgaagaagcccaagaggggtggtgctatcaacaagccagcagctgcagcgaaaacagccccgttaccgccccactctggtcacggtgggctgggcagtgctacacgagagaaattggcagcgatctttcggctacgcgtgcagcaaaggcaacagatggagcaactgaacgctagccaagcgggcttccagcagtcattgcaagagcaagtgtcaacgacagtgacggatactcctgacaacccagccgatactgcagaaaacgaaggcaccaatatcgcggtggtcaacgcagaacttgctgcagcagaagagtaccagcggcaactacagcagtactattaccaccagcaagtcatgctagcaaatagcctgtcgatgagcgtcgccggcggtgaggacctgagtgcgatcccgctccaaggtggaatcatggaccctcgaataatccaggagcgtctgacagcgctggaggagcgccgtcgacagcaagcgcacgtgcaggcgtactaccaacagctgatgctgacacgggagcggaatgtacgagccttggccgccaaccaggccttcatggctgcgagcgctgcagtctgggagcagcaactgaaggagacacagagtgaagacggcacctcctcggtcacgagctggaaggatgtgactggcgccgactcgtccgagcccgacaaggtgtcaccgaaggccggcgagaccgcttctcctctatcggatgcacgtggcgaaggtgacagcactactgccaaggaaagcgagaccagttcagcagcgccagcagtgacagcgagcagcgacgtgacgtcgcccgacacggtggagaaggccgccgagcgcaccgcgtccgcggagacgtcgccgaccaagagcgtgtcagacaagagcgacccggccgatgcgccggccgaaaacgttctctatgagtttgtactgtagctagctaggccccacgtagtgaccgcccgatgcgctcgggcttccaatagccaaccacccgcattttcaccagacggacccacttcaacttgcatcatagactgggcgcggaaatagacgcatcggaacggtacttgatcctaatctggcggccgccaggtcccaccgctgtcacttgattaaagtatgctttcagagtgatgatcatctttccgaagcgcggcaaaagttcattccgcgcgcgccaacagctcgccgcacgacgccgcagccagcaggaagccgccatgtcgtcggaagagatcgacatcctgatgaacgaggaggaggaggaagaagaagacacgcacagcgcggatgagggtgaggctgagtgggaccccaacgccgtcgaagaggaggaggaagaagaagacgatgagggggaagagggagaagaaagcagcgacggcatcgagagcgaggaagacagggacgaagacgaagaggaggaagaggaagaagaaggagaggaggagggctccatcggcgccttcttccagcccagaggccgccggtcctaccggcagagctcgaccacgtccaagaagaagaagaagggcaggaagcgcaaggccgacgagcagccgtcgacgcgcgccgagcgctggaaccgccgccgcaagatcgcggacgtgatggacgacgccgagctggacgacaacacgcgcaaggcgcgagaggccgaggccaagcgagcgcagaggatcgacgcgattctcggcaacttcgctgagctgtccgaggatcaactggcggtaccggacgaagacgaagagaagaagatctgtctcaaccccgcgtcggcagacggcaccccgcctactggggaggaaggcacagaagacgccccgatctttgtctacaaggatctggtgaacatactgaagccccaccagatcgtcggtgcgaggtttatgtggagccatgtcgctgtggagcctgagggattcggctgtgtgctggcagacttcatgggtctcggtaagacgctgcaagttatcacaacggtgcaggcgttcttgagcaagaagatactggatgacgatggggacattcagcaacgacacaaacacgtgctgattttagcaccaaccatttgcgtgagaaattgggaagccgaggtcgtcaagtggctgggtaagagggaagctagacggattgggctgcacacgttggaatcgagccgagagaagaagatgagcgaccgcgtgcacgttgtgaagcggtggcataagcgcggcggaattctcattatgggctatgagctgtatcgtctcctggtgcttcaatcgagtggcgaggagaagatcgcagccggtaaccagaagtacgcgcatctgatcaagcaggtctatgcttgtttgagcgatccaggaccagatctcatcgtgctggatgaaggccaccgtgtccgaaaccacaagtccaagttggtgaaggctcttgcgcacgtcaagacgacacgacgcatcatcttgacgggctatccgttgcagaatcacctggaagagtactggaccatggtcaattttgcgcgaccggactatcttggatctctggacgagttcaaaaatcgatttgtggcccctattacgaacggacagtgtattgacagctcggaggctgacttgaggttggctcgacgccgggcatttgtccttacacaggagctaaaaccgcttgtgttacgccgagaccagcaatatctcttcaaacaattgccacccaagaaggagtatgtgcttatgtgcaagctgactgacgcccaagcccagttataccgggaatttctacaacgtggagtgccgactcgtggcacgtctgacaaggtggatgtcctaggcggctaccacattgcattggccatttcgaatcacccggacgtcatttgcgatacctacaagcgactggaagaagaagaacgcagtggagccagcaagaaagcaaagggtcgtggcgtatcggacatttttggtgtcgaggatggcgggaatgattttgatccgtatgacgatgtccccagctcgagggcgtctagggcgaatgcaaataggcccagtacctctgcgcaggcacatggtcctcgcgttataaatgatgacgacgacgacgacgatgatgagacagcgcttttgaatatgctggatacacccagcaatactgcgcgggcaccgaagccaacagcacctccaatggatggttcatggcatcgtttgaagtttgctcaggatttcatggaaaagtatgttccgagtcaacttgaatccagcggcaagatgatgatcctcatggaactcctgtccgcgtgccaagacgtcggtgaccgtgtgattatcttctcacaaagtattcctacgttgaacactattggtgtaatgatcgccaagcacaacaagtaccagcgacggcacgcgaagcgcctcaactacttgcggattgatggaagcacgtcaccgcaagatcgattccgtcagattgcccagtttaacgatctggaagaagacattgatctgatcatgatctcgacgaaagcaggcggagagggaatcaacctctgcgctggcaacagaatcattatcttcgacgtgtgctggaacccatgcaacgactcgcagtccatgtgccgttcgtatcgatttggccagacgaaaccagtgttcgtgtaccggttcgtgacaatgggcacaatggagaagaatgtatatgacctgcaaattcgcaaagagggcgtcgcgaaacgtattgtggacgaaaaaacgacggagcgaaagttcatgatgtcggagctccaaaagtacttcagtatcgatgacttcgaggactccttgctgcacgcccaaggaaaggcagcagacgacgaagaactcgctatccaggctattcctcatgaagactccgttctcgaaaacatcttgaccgaaatgcgcgacagagctaccccagctgctgccaccagtgaaaatggagaaatcagcgctgccgggatgttggctgacaggagatgcattatcgactggtttgagcaggaaacaatgtttgaagaagacctggaccagcagtgttcgcctgatgagcaaaaggagattttggaggcgcacacatactttaaggcggtgcggagactgcgcaggggaggtacccaccttattagcagagagggtatgctgatgaagcagtgcgatcactgccgcgtgccgaacgagattttccccacctcgacgacaaaggtgcccgtgccttcgacaattgaatgcgtctactgcaagcaaccgattaagacagctggggctgttcctccttctgagaatcctgttgctccatacccgtttatgggccgcatacccggtgtcccaatgcctgctccaggaatgataccttcaacatcagcagtcccagcggcgtcggcggctgcagcagctgccgctgctgctcatgctgtaaccaagcctgtggtaggtgttgctccaactacgagtggccagagtggccgagtactgcctcctcatctgcaggccatatacgatcagcagcaaagggctaatgccttggaacgtgaacggcaaaagatgttgcagcaacgcgaattgcttgtgcgaaagcaagcggaagcggcagctgcggcgcgcaagcaagagcggctgtcgatgaagctgaaggaccggtatgtgcttgtgctgaggcgaggcataaagggttgtcaagatctcaagcacaaggcggaagagtgtggagctactctagctattgaagtcaactcacagctgacagacattgttagtgcaatgagcaaggcggagactctcaagtggctcaagttgaccaagctacccggcgacgtggagctgcacgacgatatatggctgcgcaatgaaatcgccaaggagaaaggtctaccccttatcccggtgacaactagcgctgcttcggggtcagcgacaggtgccgcggaagatgctgattccaagactggcatcgacaccaagccagccgtcgccactactccgtcgcctgtacccgcaccggttaatgatcagagcccgcaaactactgtggacagtagcagtgactttattgaactcttggactctgatgacgaggagcccccgaagacggccaccaccaccaacggcatagcgcgtagtagcagcgccgccgccgccactacaagtggttctggcacggtgattgacgaaaacgacgtgatcgagattttgtagtccgtatcagcagcaaggttaagcaagtcggccaccagcgagaattggtggacatatattggatttcgtcgtttattcaaggctctgttccgtcaagacaagagaaactcgatcgagttcctggatgaattctttgccggtgtgcggtcagcactatcacagacgggctcgccacgacaagcatctaaataatactcaccaccatctccttccgcgatgcgagtaacgggaggcagcaaactgccttcactgatcacagcattcttcatgagcattgcgagacgatgtagatcgaaatctagcacttgactcatggccttaaacacgtccgagttcgcgtcgaactgcactacccggccgctcgcatccagagtgacgagggtctttgtcggacacacaaagcggcgatgctggaccagatcaaccagagctttgtcttcgagcgcgtaaggaaacacagattggagagccgcgacagtgacgcagccttcgaacgccccaatgcactcgatcaagcagccagccgagtcggtagacacaacttgcatggaatgcgtgctgagccggcgcacgccgaacagcttcttgtaccgacgccactgctcgaggaactgcacttgacccctcacgccaccgccgacagatatgctctcgtccagcaatgcagcaagaaagcgcttttcgctcaccgtaagcaccttggggtagccggactggaagagatggaagaagtgccccacagaccgcagcgatcgcgcgtggaactgctctcgagctatgagcagccgtgtctcccacaggctcttctgaacaagacagtcgtgcatctgctgccgcaaactgttcacgtccaaggtgaggttgaggatctcggagttgtcggcttcgcgttgagtcttgtcctgcgctgagagtctggacttccggcgtttcttgcactagctccagtagcagaagtagcagcagcagcagcagaagcagatcgctttgagttgttgggcatccgatcctcgctacggcggacggcattagcacaagtctccaaggatgtagcttcagccttcgatgccaccgccgacggagcgtccagcagccgcgagatatccatggggagtgcaagaccgatgggtctcgtttcgaaatgagctttggtgctgttcagctctacagtaacgacagcaaacgggatccaacagtgttggaccaacaccgactgcatggtcacgtggtgggcggttaagcatgcggctagtgcaccagaatgattcacagtatttactatctttccttgtctctcaccagtctctccagtctctagcttaagacaagacaaagtttatcgagcttctcgagctggtcgcagacgagcagacatcggcatgaataccagcgtacttttgttcagaatcgtcgaccggaggtatcaaacttccttcgctgatcattgcgtccgtcatgatcttcgcaacttgattggggttgaagtccagcagctcgcttatggccttgaagacattggactccgcgtcgtattgcactagagatccgttcgagtcaaggctgatgagagtccgcgtggggcacacgaagctgcggctcagcactcgctccacgagagctttatcccccaagacgtgcggaaacacagtctccagcgctgcggcagtgacgcggccctcgaactcgcccagacactcaacgaggcagccggaagcgtcgctcgtgatgatctgcgccgagcagatgcggaggtgacgcactaggaacagcgtctgtagcggcgccactgctcaaagaactgcgctggaccgcgcaccccttcgccgaacgcgatgttctcgtccagcagctcggacagaaaccgctgctctgtcgctgggaacgcctcggggtatccgtctttgaagaggtggaagaagcgctccacggtctgcagcgaccgggcgttgaactgctcgcgcgccacgaggatcctggtctctcggatgctcttctcgacgacgcagttgtgcacttactgtcggaggtcgttcacgtccagcgtgaggttcagaatgagcgagttgtcggcgtcgcgcaggttcctggctcgaatctgctgggcagacggccgtcgacgccgcttcctcttggcgagtacaggaggagcttggctctgtttggcctcgtggatgctgttgagcagcaggtgcttgcgcgccttgtgatcgaacgcaggagcgtccagcagccgagcgatctccatggtcagcgggatccggtcgaatcaagagtgagtgttcacacaagaggccttcagtcgatcgctcgcttcctttgtcgccgtgcaaaaaccgaggaccaacttcaactggcccttgcatcgaccacatgaacaagccttcacccaaccactgggtgcctgcctggtaggcagtgcctacacgcagtgatggcgaggctgtcgaggcgaatttgtcgtgcggttaccaccttttcgacaaatatatcgcggttcctccttccagctcgctcattaactgaccgacatggatgcgttctcgagtgctgcagcgtccagagcctcgtggtcgaaagctcagaagagggtgaacacccacgctcacttgcatcggaaggagccggcagtcactcttcctctattatctcgacgtgccagtggccagcaatccagcactcccggtgtggtgggggcacgcaacgcctcgctgcacgccttccaagtctcgcaactcgagaacaatgagcgagagaactacagtcgcagccaactgcgcgcgatggcgagctccaagttactgtccagcaccaccaccagcaacaacaacctcagcagttcacggattcacagcagcgccgagcggttggcgccactaggcccggccagcttcgagaagacccgagcccagcgtcgaccccttcccgccccgcttcaagctgctatcaacgaggttctggcggtgaaaaacttgatcgaagggctgagtgagagaggggagagtcgagatgacagcaacaatgacgacttcgatgacccggagacgccggtgatacccatttgcaagcgcgtgagtccgcgcaagacccaactccagagtcggcggcccgagtggcagcgatacatccgccgcatcatgatgacgaagggcatccgaggctcgacactcgcgcgttatcgccgtcttgtggggatcgtggctcgccgaaacctgactcatagttatgcgggtgcggccgagcgcgtagtaagataccgcctcgagattcgaagcgcggccgcgatacagaccatgacgcgcagttttctgacccgacgacgacaggcaaagctgctgcagcgacaccaagctgcggcgaagatccagtgtctctgcaggaaggtgctcgcggtggagaagcagcgaaaagtggcagaaatcgcgcggctagtggagatcgagcgattccgacgcgtatccgcagcgcgtactatgcagcgaagctacagaaagtatcgcttgaagcgccggatgcgtgaggaacagcaacgccagcttcagcaggcgagtatgctgcagaaagcccgccttaagctcttgcggaggtatcagtcctggcgaaagagctccaagcaggacgaggttgatccagaatctgaatgcgacttcaacgtcccggaggataggatttcgactggtatattgggcggcgagagctcccagagtgtggaagatctaccatcacgcgctctcgctactgaaaagctcggggggttggctgtgtttgctactttgagtgagaaccagagcacgaacactcgaaatgaaccttcactagactgctcagctctcagcaatcaagccagcaccccaagaagctctgcaccccccccagaagtcgaggatcaacctgtgaaggacaccacgcattcttcggtaagcaaagaagctgagcctgaagaggctaccgaagagggtgataacaatgctagtgctggtgatgcggacatgcctgccgttctgtcggagttatcggcagatgaacccatacaacagcttgaaatttcagcagatgaacccccggtcgactcgcaaacacagagcaaccaactgatttccttggagagcgcttcaccgtccaagcaggccgaagaaaaggccctggggattgaggcttcttccactgcggctgcagtcgaagtggagcttggagaggacagcgacatcattggcaatgacgacgtggagtcgcttggagctctgccatatctagacgatggccagcagcagttcaacttcaacaactcggtagatggtgaagacgaaaaagcaacacccgacttggagacagcaatcacagccacaacaatgttaagagctgctgcagcgaagaagattgcttgctttttgctgcccaagctgcacgccagacatgcactaaaaacacacgcagcaattcagatccagtgcctggctcggctgtacttggcaaagcaacgtttgactcgtgttcgtcaagaaaagctgcagtcgcttcgggctcagctactcgctcgttggcaacccgccacactgacaaatgagagggagaatgagagcgaacaaggtattcaagacgctgtctttgatcagaacgacggggacgacgaatttgactcggagatccaaggacaccatccaggtttcgacgcagtgtcggagaactacattcacctgctacccactcggaacggccagatcccaccgggtgtgccgttgctgcactccagcgctggggccccgctgctcccgctctggaagtggagctggccaggcgagcgttggcatagcactgggcagtaaaattaaatccaagttgaaaccaacctacaaactgagtgaaaggcgccagaatagaacttggccacacgctgttggcaacagaaagccgtcaagaccttttcttctagcaaaccattcggagactgtcaagcactgagctgtacacagcggacgatactgcgaccaacctcgcggtttttttcttctacatcctgcctcgccgaactgaacgtccatttctcctatagcatccagagccccaacaagtcgtgtgcgctatcccgtcgctagtacaaaatgaacatctccgatctgttggattcttgccaagcagcgtcgaatccgcaacccgatgccgcgattccagggcctcaccttgccgatgcagcgactacgttagcggctgcttcgattcaaacgggaagcaagtcacaagtagcagcatccaggcagcaaaagacccgaagttccagagtgagaccccagcgcaagcctacgactggatcaaaacgcaagctcaaaacctatttgaatgccacgcagaaagcggatcgagaagcgcacgcagctttcgagtctcgagtgttcaacctgacactggacatcaacgagcagctgatccgactgctagaagaacgccgcgacttgcacgctacacagctaatggtagctcggcaacacttcgagaacggaatctaccgcgtgatggagcgatacatgcgcgtcttcggagcactatcgagacgtcggacgtgtaatgagctcactgagttcctggcacacgtggatccgtgcatgttggggcccgatatgaacgccaaaggaggtctcccgttcttcgtgtggcagtggggatgctacaacaaccggttccaccactggcagttcaaggatatctcgactcgcatcgtcaccttcattgaagacgacgacgttgaagtggacagcgagctcaatactaccagtagcattggaccgggtcccggaggctgtgtggtggaaactgtgggcgagttcacgggaagcccgactcgagcgatggtagctgcgatgctccccaacttactgtcggacggaggcttcacggcgttgctcacattgcaaaccatgcacttcccagcccgaatattcgtgtatttcgatgcgagagggaacattgtgaagcacgtgctggaggcggatgcctttgctgcactgcacgcgattgtggaggcgaatccaggtcgagatacgagttcggctccgaatgagcgcttcgctgaacttccagttgtatctaccgctgctttagaacctactagcgacgaaacaggcgtgtcaagtggagcatttactgatggagggagtcaggcgtcaagcacaggaaagcgatacgacgtggactacattttgaactagacaaggggataaaccaggtactacaacataaacgcaatacttaatttgcaaaacgagcggcgtgagggctccaacaaaacgacgctccaacgctacgcttgccgtgaagaaatgtaccaagaaagctaaactgacaatttctacgacattaactaacgatactctgggtgatgttcgagaatgcacgcaaacccgaaatcgaagcaggactgacaacaaaacgtcaacggggagttctttagacgattgagtggcgcacttcaggctgacccctttgctaagtttgcttcgaagacttgcgctgctgaacatggagagcttccgcacaccaacagatgcaaatgacagactcgccgtgatgcaatttaacgatgccagtgcaaggcgcttcgtgaatttaaaagttaatttggatcctgcaagctacaagttggcgtccaaaaacctctggtgaaccacacatcccagacttcgactcaacaggcatcaagaagccggcgcctttagtgccagtccagacccaagcgtgtagaaataaagagccttacgcttcttccgacactggcaccatgtccacgctggcctgatgacgcgctcgaacaacttgcagccccgctgaaccgaccgtgttgctcaacgtttaatctgacccaagcagcacgctgacaggctcattttcagttctgcgcgcccaagcttgccgtcaacccgacgttttgcttcgatcatgaacatctccaaccagctgaactatctgcccaaggaacaaaacacacccgtagtgaaacgcgccataccgcgcaattcgatgcagttcttgctctgcgccgtcagcgagaaccagaacgagggggagcccaacaccagcgtccaaaccgagcagggaccagctaaaaaggccaagctcgcgacgctctcggtgatccccgacaaggaccgcaagcgctcgtaccgactgagctctaagcggcgccagtgtcgccttgacaacgaagcgctcgcgtctcgcacgtacaacttgacgctggacgtgaacaacctcaagcagcaagtgcgctacctgcaggagtgtcgcgatctctacgtgacgcgcttggcggtcgcgcggcagcacgcggagggcgaggccgtgggcatggtgactcgcctcttccgcttgttctgccacgaaacgtgcggcacgaacgaggagcagccggacgaccgccagctcttcttgtcgcgcgtgcacgcccgcctgaccgacgcgtccgcgggcggtcgtgacggcatcccgctcttcatgcagacgtggagaaacttcaagctgctcttcacgcatcgctcgtacaccgtcaagtccattcgactagtgagtcacgtgggggctcacgactgcgaagaccacagcgcctcgatttgcgcctccgacgtcgtgatggacgaggctcggcaacgctgcggtccgagcggtggctgcgttgtcgagtccgccggagcgttcactgggcgtctcaagcgcgacgcaatcgctgccatttaccccaaacttctgcaggacgaggagctggtgacgcgccttatcggacgcaagttttcgtgctcgctgcgcctgaaggcctacttcaacgctcgcggacagctcgtcgaccacgtcgccgagttcgacgtactcggagcactgaacgaggtgatcctctcaactaataggtaggttagaaacattggtgtctttggatgagtcagctttttgctagccgtagggacttcaacttggtacttaccgaatagactcacacgtgacatcttgcgttttacagactgtagagcgcaagatactgtagactacagtagctaaaacccaatcgattaatttaacgctgcgtatcatcaacgagagccctccgtcctcttaacttatgaataactggcgggtgggatacctgcgcagtgtaccgtgctagctcacgtcagaccagggacctggcacgtcaacagcgctcacagcagtgaagcctcgtgacgaccccgaggtgcgtggttcccgtcggcatagaagcgttcgccgctttgccgtcgccgcaccagggcacaatcacaggctggcgcggcgcgtaatacaaaactcaagtcatttctttcgccgtctgtcggttcttgagcccagttcggaattgcgtccgtcgagcagagagatcacacactgtgggcatggagaggctggagccgctgctggagctcgagctctcgcccgtgcaaaagaagatggcgcggcccaagacgccgcccagccccggcgacggcgacaagggcggcaacccgctcaagcccaagagccgccgcctgcccgccgacgtgcggcgcgcgcggcaccgcgaccgcatgcagcgccagcgtctggccgagaagaagagcatcgagctgaagcgcgtggaggtggagcgcctcacgcgcgagctggagcaggccatcaagaagctgtcgagccagctcaagagcctgcgcgaaggagacgaagggcgcggcgtcgaggcgttccccagtctcgaggaggaggacacgtacctaaagctgctagagggggcggaggaagaggaacaggaccaagactggaagggccaaagcacggccgcgcgcctcatccagcagcgctacctgagtctggtgctgcagcaggagaccatcacagaggagaaccggcggctcaccgaccgcttccgcgagtggcagaggttcatgaagctgctgggcgtcgagcacgagcgcctgcccaagtacggggacgccgcgcgcgccatcgaggtggacgagctgcagcaacaagaaggcggaggcgaggggcgatgggtcgtcttctccgaggacgagcccgtgatttattaccagcctctagcgcgggacacgtgccacgaactggcgttcagagggtaccagaagatgcaggaggtgctgggcggcctcggagccaggaagctctacaacgaagccttcgggtggaaagtctacttctccatgcacgaggagggacagttcgagtcgcgcacggtcaggatgcagcaccggtttaccaagcggatcagtgcagtggacgccaatggacagcggatcacgggggacacgcttgcaagtgcgacgtggcatatcatccggacgcccgagctgtacacgcaaatgtaccggcagcccatgacgtccaggatactgcagaaggcggacgagcacacgtccgtgctcatgcggacgttccccgaccagaacgctgtgatgcgcctgaggttcgtgtgcatggtcatccaggtggaggactgcgtgatcgactcgacgccagatctcatgggcttcagctggaagagcgacactcggcgtcgcgtgacgctcctgagctcgatcctggacccgagcaagtgcttccctcgagccacgacgcacacgcccaacccgacggccgagtggatgcgcgaaggcatgagctatctgtcgttcacggagatcgacgacgaaaacagcatcgagatcgagtatggagggctcatgaatgtgggcagcgagacggccacgtgcacgggactgccctttgtgtgcatgaatatgggcgaggcgctcgtgcgctgggagcagcttgtcacccccacgcgcacgctgtccatcactgaaaagtagcctctctgtgtgtatctgtgtagatccattcacccgtaaactaaattgcatgcgtatccgtaagtaagcagcatgatcgcgtccgggtggtaatcggacctcaccgtgtcgcggcgctacatagagtagaagatcgcaaaccacagtgtcgcgcttgcgtgagagtggcccgctaaaaccggtctcgggtcggcctcaagcttcaaccctactgtaaagaagtcgcgtccatttaacggagacactgcagagcacaccttctacgagccctggggagagccgggctcctgggctctagggtgaacccaaaaagtcgcgagctcgggctcctgggctcttgagttcaataggttaagtgaaaggagccctccagaactgtgagccctcgttaagggctccccctcacctgtgttaaatatctcgctgatgattggctgtcattgaagtatctccaggttctaacctgaaaaggcataggaaagagggcttctccttgaggggaaggaaggactatcggcgacgctggggtggcctcggagcggctgtacacatatgagtggcgcgagatcttctagtgtggcgatctttgagctcgatcttctagcgtggcgcatcgatcacgcgaagttgctcgccttaagtctaggtaaaattggccaatcagatattactatgaagagccagtcatagctttgaagctaaatttggggagccctggaggggagccaatggggagcccgtccttgatctcgtacttaccacgagggagcccattttgtgcgacttttggctctcgttttagggggagcccacttttgaagtagagtgtgctgcagagcatgagctgagaagatggttgaagcttgggctcggggcctcgtggccagtgacgtccatcgccctgctttgggatcgttgtcctaagaagcgcttggcaccacgtctgcagcgtttgtagattcttcaaacacaattgcctggagccatgcgcagagagcctcgctccgacaagccttcgacctgcagggatttaggaacggctctgtttataatagcattacacgaagacctttagagctttccgctgatcgtgcacactcgtgtggactgtggcacccctgatggatcggccggtactgtagaatttgtcgacgaacctgagtcgggaccaggaagtgtactgtacagcacaaggcgactgggtcaagcgtgactacgcagtcctgtgagtccacactcataacaggggagcagctaagtactgtacgctctgtagctcagctggactacggcatcaggactcggttgacgtgacttgtttgcggccgagtgcccgtaaagtgtaaagctgctcggaggaggtcagggccttgcttttgcccacgttccgcccgacgccaaggcaaatcggcgcagagtggtcgctgtcgtcattgaaatcgtgcttgggcactttacacactccatggtctcatcttgtcgtccgcggactccgcggcagcgcttggcctcgcatagccagcttgtttaccgcattcccttgttcgtagctcgagagctacatgtatacaatatcgtcgtgtgcaattgacctgcgtgctctttggcgagtaaagcgtgatgaccatcggatatcagatgccggcagatgagtctgcatgtgcacgaagcacaaagttttcttgtcgcctctcgcctctcgccgctacgctacgcagcactcactcgcggcgtaggcctaggaccaatcaatccaagccagtcgagctgtcgccactggcgtgcctcgcagatccggtctgcagcgtagctcgctcgcgctcgaacgcgctgccccaacgggacgaaaaagccccaggtcggtctccgcacgagggacccgcagaccgagcgaggcctaacgcaagcagaaagcgccaaaaacacgggcgggcggtgcaaaacggtgttgctgggtgtcaacgggacccccgctgacacccgaccgatcccttccactcgggttttagtcgacgacctgatctgtcctaacgttgggaccccctatctagcggaggatgaatcataacggcggtggcggcgcaggcaccagcgtaacttgctgggtccgcagcggcggcgcgttcggccagcagacgcagctgcagttccagaacgagcccttgttcgacgccgaggtgaagatcgaggacctcgaaaaggagaagcagcgacaactggccgaggccaaggcggcgcgcaggcgacagcggcacaaagaggtcgtggcgcggtcgcgactccgacacaaggagacggccgcagcgatccagcagcaggagctggagttaggtcggaagctgcacgagctgctggagcagaccggacactctgtgacacaagggccctccgagtcggcggtgcttccgttgcacaattccgagttgaagcagcacgagctgcaccacaagtacgcggagcaggtggcgacgcaggagcgcattcttcttgagaacaaggagctgcgacgcaggatagaaggccacgccaagttcggcgacgctatcgagaaggagtgcgtcctatgcgagatcactaccgactaccgcgagtgcatcaaaggcgtcgaaagtctccaggtcagcagcgattcaaactcgtggatatatttcgagggcgacgaagacccgatctactacgtgccgctcacggagaagaactgcgaagaagtcatgcgcgcagtctatcagcgcatgctcaacctgtacacggagttcatgcagcggcgcgtgccgatctccgagctcgagttctttggctggcgcgtgatgcggccgctggaggtggatccgaggatactgcgcttccagttcaccaagacggtgcgcgtggtcgaggactccatggacgacattgtaaaccgcacgtgggacgcgttccacgaccccaagaagtacgcgaccatctacagcacgcccgtggtcacgcgcgtcatccagcgcgtcagcaacgacatgaccgtgctgctccagaacgcaccagtgcaagctggacagcagcggaatatccgctactttaacatcctcgcccgcgtgcgcggactcaacgcgcagaacgagcgcgtcgtggcccttctcaagaccatcgtgaacccgagcgattgccaaggcgcgggtgcgggcgcggtcacggcccagctgcacgagatcgagtggatgaagcgcggcatctcctacctgctcctgaccgaggagccgccgataccaccggaaagcgagacccgcaccgtccggctgcactacggctgcgactacgagtgcgtgagcgaagagcacgctcagtatcttatggtggaggtgctgggcatcgcctgcaggtggaagcacttggtcctgccatcgcaccgcctcacgttctgaaagaacgccctcaacagtgcgaagacactgtacaatacatacaccagcactcgattaatttaacgtcgcgcgcgtagcgaagtacaagtacggctcggcgcgacgatctcacacgaatgaattcatctgatgcactcgaaataaccagccatcgagcgaggacgagcccaagtcttccagcctcgctagacgcgacttggggaaagcttgagcagctctcgagccagcagtacatgcatccggatggggggggtaaaggttcgggtcgtgatgcagcggcccggtctgctgtggatcgctacgaacgaaagtctggatctgagtcagctcgcttgtggacacatcaaagggagacgctcgtgtctcttggccggtctcagcccactccggtgaccgggaaccggctccttagcggagaccgtcgagtcgtcggggcccccacgttcgacttgcccccgcagcgctctgaacagcatacacttacccggggccagctcgcgctatctttggcgggcacccacgcacacgcagctgactcaacccttgtcaggacgatgcagccgacgacggcgccactgcgcatcggccacggcgcgcggccgctggcgagcgagagccactggctgctgtccacggcgggcaaatggaccgaggaggacgagaaggagtggaagcgccagcagcaccgtgagaacatggtcttcttccgccgcaagaagaaggagcagcaggcggagctgcgcacgcagcaccaacagctcgagcagcggctgcagcagcacctggccatgcagcggcgcgccgcctcgcgcgcgtcgcagaaccatcgctacggcaccagtcgagacaagaagcacgccgccgtgtgccacctcatcgcagagaccgaggcgctcaagatcgagaacgtggcactgcgggaccagatcaacaagcacaagacgctgcaagacggcgtcctagaggcgggcgacggactcgagtacgacgccacggaaccgaccagcagcgtcgccagtcgggacggcagcagctcggacacatcgtcgtccgggggatcgctctcttctgggtcgtcctcttcctcgtcctcctcgtcgctgtctcacttggtctcgctgcagcgcggctggcgcgtgcacttttcagggggcgagccgtccttccacttccatcccttcgccaaggagcaactggactccatccgagagggttacgacgccaggttcgcggccctaccgcttcttactaacgtcggcagtattctcgggtgggaggtcgagcgcgcgccgttgatcccacacccggcgctcaaggtgctggttgcgcgcgttcgctacacgaagcgcatccactgtgctggcggatcggcgcacgctacgatggacatgcttgacgccgagtcgtggccggttctgacgactccggagctgtggcagcgcattcacaacggctcagtgacgtcgcaagtgctgcaggcggtggacgaggacacgtttgtgctggtgcgcaacgcacccgagcactcactgggggtgatcattcgttatctcaaccttgtgagtcgacgacgcattcagtacccggacggacggaggtcgattatttactcgatggtggtcgtgacttcagccgcgaaccaacgcagtcgggaggcagagccagagcgtcgggacgtgcactgggtcaacgaaggtggcgcctacatgacgctgtcacagattgaccatggcacactggaggtcgtgtacgaccactgctccggctgcataagtgagcagcacgcgcagcactgcctcgttgactggggtcacatcgtcatccgctgggagcaattggtgaccccttccagggtgcttaccttttaatgctgaagagagagaaaatgggaaaataggactgcgtgtacgatagacaaagtgaacaaggcacagtcaagaactgcgcgcgaatgataaatgaatacaaacacccggtgtggattccaacgtgctcgctgttgcgatagtaagatcagatcctacagcgtcgtgaagctggtacttctgtaatctcgtcttctcaaacccgatgaatgcactttggctactcagagctgccaaagtaaaacaaaaatatgctcaggatgaataaaaatcaaattttcaagtattatcaagttgtcctctacaagcacagcagccttgctggcgatacgttttgctccagacaaacaggaaaccgaatccagtcgatgtacagctctcggccgtgttgctcgctcagacatccagcccactgctcgcagacaacatcgatggtcgattcgtccacctctgtaatagtagtgcatattcctccttccaggacccactgcacgtctttctgggggccttcgacgtccctgttgcgcgcgttcgcctgcgagtcgccgatcgtcaaaatatacttgtcgtcacgcttgccgtccgatctcctttgtcgagtgtgccacgctaggacgaggtagcggagattgacctcccccgggaggttgcacaccataagatgagcgttttggctgaagtcttggagaacttggcagaatgtttccccagtctgcgtgagcccccaactcctcggttccaccagcacgggccataacttcttgtcaagtcgcggtaatattctctctgcctcatcgagcgggcaccgcaaacgtcttgtgaaccgcgctcgtgccatgaaggactcccccggcgtagtttgagtcaacggggagtaatgaaccgtccagccaagaatcttcccgatcgttgcagtgcaggggtgactgaccgcaatgtcattgcggctgacgatcgcctcgaactcggccctcgtgaacggcgtgaagtagagcgacggctcgttgttggggaactgcacgcaccatccagtttcgtcgttcgacagagacggagggggatccaccggtcgaagctgccccaggaacgcgtccgtttctcgctcgagctgagtcttgatgctggtttggtgctcgatggcttcgcgcagtgctatgttctcgctggtcagagccgcgcactcgacgaggctctggcggtacgcggtggctagtgaccccacctgcattcggtccagccgcactcgcgcctccatgacctgtagctgtagctccttctcgaggacccggcgttcgtagagcatatcggccatcttctccttcttcaggcgccgccagttcaccatccgttgacgctgttgctcgcgtcgtcgcttctcgcgcatggcgtcttcccatatctgtgagggcgtcgtggggtccggtagcagctcggtttcttttccttggacggcgcgagcttgcgccatcacccggcgtgaggacgagataacggagaccatgacggcttaggggaagtaggtgggatgatgtgagtgggctgaagcgccagagcctctggcccagaggggaagagcggagtgaagctgtgtgtgtggggttgtggcggcggctggcacatcacggtcttgaatcacgtggcgatctgtaaccaaatgggataaggacatcaagcgcatcgtgcactcgccctgtaccgtacagcgtacagtgtacgctctcgcctacagctaccgaccagtaaacatttcaagcagacgcggtctcagcaaagttactgcagtaactttccaatacatgtacctaggtaggtcttagcatctctgattgtttctctttcaagttgcggtatatttatatgtaaaggcctcaaaggttccacccctgaatgctgctaaaggtataccaatcgcgagtactctgcagaagcagtatttcattcttacaagcatttgtgccagtaattcaaggtgcacgtgcctgtatcttgagacttacgggacccgtacaccacttgcgtgcatgcacttcatcagttgtgagtgatccaggcaaactcgagcttcgtcgtagtatcacctgatgcgttatactgtagactagctaacgcaagtactttagctgagataacaatggccatcatggttgaccaacgccatggaatttctccatcgccgtacatgtacgggagatagtgctgtttatggaaagtaagagcaaagttgcgtcgagttccgggtgacgtcagtgaaggcaatagcaaggagggacaagatgagtccccaaacggttgaacaaggcaagttatggaggactgtatcgacagttttctattaatcctgggcaaccaggacaagtacgggtaagcagcatgcagctaccaagagaatcgccattagtggtgatgatgaaatcttctttaggattttaatggctatcatagtagtccaaataaatctcttctactactactactagtgctgtttatggtagaatatcatcaaatctccgaccgcacttaagatgataggtatacaaatccccagtcaagcgcggtcggagcataacagtattaccctaccccttcccaaagtgttatgcatacacagtccaagatagattagtcgtcccgtttgctcattggtcggagccttgggatggatggcacggagcgagcgtagcgagcccccgcctgcggtttgacagtccgtgtgcgtagcacgcggctgcaaacccacgacccagcagtgctctacctagcaagcggaggcgacgcgtgcgaaccgcagcgggcttaaggttctggcccagcgagcgcagcgagcctttaggggttttaggtttgcgcgtagcgtagctgggtgatagttaaaggtgaccaccctcctatccgcatgttttgtgtacgtgtcggagaaagtcggaggaggtttttgggtatggagcacgcatccacgtgtccttcataatccagctgggaggagggaaattgactacatatatgtactgcaaccggttgcgtttcctgtcggctactggtttatgattttcattattaatggcttgcaattattatggaaaccgattagattgtctaattgggatataaatcggttgattaagcagatgatgaagcttaatcgggtctgatttgctaaatccgacctcctaattagatcgaaagactaagatttgtactctgatttgacagagtggtcagttttgcctacaacgccatgtggcaagctgatttagctgctccacggcttacaaagcccgggacggctgatttgcatgctaatcagcccgaatgtccgacacccacacggcattcggtggccgatttaacgtaaaaccgacaaacgctaatgctgacgagaaatgacagcgcaaatacatgacttcagaacttgataatagaatgcagtacacatcgaagctcacagaagcgtatttaatgcacgcgatgctatttttcgttagtaggtacgcgaatcactcagctcgtggcggtaagtggtcgctcgtcgtatttctggcgggtaatgaggcaacccccattttattaaccttacaccgatttatacccttaccaatgccacatgaaatcataaggatccccgatttagtaccagtcaaatctctcatgaacgctgctttatcagctaatccgctcgggcaatctaatcggtttccacaatactttgtggcctgtagttcagtcattcgttatggtggtcgagactaaatccaatgaggtcgctggtacagtttgtaaaagaaagcgaaatattgaaagagcaaagctcagaaaaaaaccgggtccgattttcgagaaaggaatttcttagtttcctggtattaggtgaaggccaggtaattgaattaaaaaaagagtactcggtatatcctgggatagtggcacgagaacctcgggagcgaaacgatcggctatcatctccaagtagagcgctgtcattgatagcgatttacttgaaaacgggaatcaggggccacaacgttgtaatttgttttccatccggataacagacactttacttgtaatagtatctgctttacgctcatcagtacttagacgacgaccgtccactcgcggacggaataggacgtcacgaggtcgttgagggcgtaagggtcctctttggcgaagtcctcgacgagctgctggtccgccgcattgaagacgacgactgcggcgtccggagggttcgcgagggcgccgcccatgaccaagtggccgttcttcttggcgctctgggcgtgttccaggtgctgggagcggaagggcgcccggcgctcgaagatgtcgtccacatactcgtagcgcaggatgaagaacttcttgtcggcagcggcggcggtggacgacatggcgcgggacagcgaggaggacagcggcgagcgagtggcgacttggcggagggcgaacatctttgtcgacagatcataaaaatgtgcctccaatcaatcccctacgtagtgattagcacggtatattacattaggagggagcgttaataacacacagttagataaccgtgtcctgcacttctctggcccacataagaaacaacacttcggttttctggacataactttttacaaaaaaaatcgtttggtgactcgcaataactcaaccgaaagctgcgcatttgctccgtttcacgctatgatttaaaaaaatctagcagcagaaagaaaagagaaacagcctttatctgaagtccgttttaggcaacattaggtttttagcgaggtaccgtcaaaaattagcgatattagaaaataaaatatcaccgtaatcgcgagtgactgctttacccttatgttcggttgtcgatgttgtagcgcctgctacagttttgaggtttttctacgcgattatctcgacatgcgcagaccaatttattttggccaatagtaagatgaaacagttgattatacccaatcatatgtgacatgtggtccacatcaaattgaggtttaatgccgaacgttgtttcttaagttggccagagaagtaacggcgaagtcaagggttttcatcactgatgaagccttcgtgtgcgctctttatatctgctggaggatgtttaaaaaccacggggattttgcgtgggtttgaaggagatcttcctcatcaaatcgtttttgtgcaacaaaaagcaacaagatcgttcctctgagtagggggcaatggacttgacttcaagtcaatgacttgctctcagcttgtattctgtattctattagggtgtcaaacctacaacctcggctcggttgccgtgaagcgacatgccaatttgacaggatgcggggaagacgctaaaaccgactgtttgccggtaccggttgatgcaaattggtgacgttgtggcagctttcgaaatgcatgtgccagcgtcctgtaacacatcggtccgtgaccggtgacgcaaatatacgtcctgtctcagcgatgaataacatccgcagtgtgcttcaaaacatgtattgagcgaaggcaggaactcggtacttagagcacatcgctctgttttcatttcatcgttgtgggcactaagtatttaaacgacagcggcagcatcgatcgtctggcagtgtcaccaaaactatggcgctctattagctcaggggctgcaagtccgctagacttgcgatgcatcgtttcgtacagtctctgctcatgctttgcgtcgtgcattttttggtgacgcacgggactttgggccactctggactgaaaatgcattgcgtggacggcggtgctctcaacccaacaatgcgctgatgatgtcgcccgtgaaagcattccgatgatcctaacaccgccactcttgtttgcgattggctcgccccaagggagcgtgcgtcgtgtgtgcgtcgtgctttgtcggtgcgacaccaagcagtccggagatgaaaaatctcttgtcaagctggctcggatctgaggcccgacgattgcattgagtgctcctctctcattatacatttctccgtgttggacttaaagcagcccagcaccaatcgcatgcacccgtcgccggcatccgtagcattcgcttcgccccggtggtatccacagactcctctaatagagtttacccagcagaccctaccgacacaatgtccaaggacacagcaattctcatcttccggatcctctctggcatcgccacaacctgcatggtctccagcccgtcgctgctaatgtaccgcatccacaagcagaagcacgtaggcgtcgcgtccgtcttcccgctcgccgctttactcgcaaactcacacgtttggtacgtctgccgcttctttcatccaaacccaatggaatatgatttcactaacattttctcttgttcttgtctgtaggatgatgtatggatatctcgaggatatgtggttcccagtgttctcctgcttcttgtacggagagtgctgcgccgttgtcttcctaaccatctacacctactactgcgcggacaagggctacgtgatccgcactctgtctgtattcttgacgatcctcagcctcttgacagtctacgcgatcgtgggcggtctgggctacactggccagacgaccaagagtgtcagcaccatcatcggcattttcgccgactgcgccggtatcagtctctacggagcacccatggagaagctcttccaagtgctcaagcacaagaccgccgtcttcatcaacgtgcacatggtctacgccggcatcgcgaacaacattgtgtggctcacgtacggcgtcctcatcaccaactggttcatcatcttcatcaacgtgctattcatcacggtcaacacgttcaccatgtgcctgtacgtcaagtacgaccccaagacgcacccgctgcaggacggatgggaccgcccggacgacgaggacgacgaccagcagatctccgtgaccattgagatggcgccgcatctggagaccaaggcgtccatgaaatcccttacgagtctgcccagtccagagtacgcgtgcatgtcgtcgccgcttggcgagctgcggggtgccagcaaagagtaatctagcgaagtaaaagcaatccgaacttaacctcaacgttcgcgctttgcccatctgtccatgtgaacgttaagcggacttaacgttagattgtgtccataaattatgtgctgaacataccaaacccatgtaacaacatcatgaaactatgctacggcattcataatgaatttatggacgctcccgacagatttgggttcatttcaccccctctgactaaaaacatgggctctatcttttccgatgaatttaatcgtcgctcgtagaatgagcgtgcttgttctgcgtcgagttcgactcgactcagggttttatcgaggtgtggcgcaagcgatatagttcgtctgtgttaaagcgttgctctgtgcaacctgtcgttgaaatcgttttgcaggggatgggccgcgactcgtggctgtctgcttcagtttctgcttggagctgcaccagctcgaaccgttaaacattcctggccccacgatgcggtcataacttgcatatcaagctttgatctagcggcactagcgcagtgaggctgaatgcaatggcgttgcgcactcacaacaatcgccaaaactatttgtgctgggccgccggcggaatgattcagcgtggctctgtctttgatttcgagcgtgagagcctcgattgctcagcgtgccgctggtgagcttgcgcatcggtgtcgcttggctacgaaaggactaaatcttagcctcttatagtgtgtcaggctcacggtgatgaggccgttttgtcgagggaagatcgcaatcccatacgcaccaccgcgtcccaagtagtggctctgatagcacgcttcaagtatcagtcgcgctcaacgcataatcctcggcataagctgccgtcggccgcgtgggcgggcgggggggggggggggggggtgagctgccgctcgtttattgtttcatatccgtgattgaaagcggtctcgccccgctgattttccgtttccaagctgatcgcccacttatctgggggctctcgcgccactatcatttgcgaggcctcgcctcgaaaccgcagccgtctacgtgccgcggcagcgccctcacatctttgcccccaatggtatttggggtgattgggaggccagtcaagactgggcagacagtctcttcacgaatacctattttgtcagaccaagagcatgctgaatgcatggggcaattctgactgcagtgtgcgcaatgatagcgagcgctataactttacactccacgacaaaaagatatggacaccaccaaaagtggctgtaacttcgtcaatttttatctttataaggtgcggtttggactagagttgcagaacacgctgataaagatctgcacgttgctaacacgcgcgcttttgcgtttcttcaggtagctcacatacaaatcactggttctgcccaggtgacaaaacttatggacagctaatccccatacaaaatcctatattaacaaaaacctcttacaaatgatacgacttggactttacgatgcttgaccgatgggaaggcggtgcccagtgcgagcgagcactcgtccgttgcacggagcttgcttcagtaagaaacgctgcttggagacacgctacgcgctccaaagacgagacgagcatcatttttaacgttttcgggcatgtaaaaccgagcgtggcgaacttcgagcgcgaagcgacacagccccgcagctccgtcttgccgccgttgcaccttaccgctgtgattaaactgcgccatgccgttcatcttcactcgagtcttgcataaactgtcggcactgccagctttatcgctggtcgtggcgctcgcttactcacgactcggcgcacaaatagctccacggttccactgcgtttctcgcgtgttcttcgccgcttgtgctacttcagcagagtctagacacgcagcggccgtttgacggaggacgcccaaacggacgttgttcgaggcgcccaagagctcgtctatggtcgcagcgcggtagatttgggtcctttgcgcgcccaaagcaagcgcggtgcatgtgacgagcgcgcgagctgcttgggacggtgggacaagcggccggcacgcttgactcgctttcgagcgcaagtggcagcatgccgagtctggatttctcaaccagtcaccgcgcgcgtgcacttatgcagcaagccagcgctgctttcatctcgaaggcgatggatggaggcggtcattatccaatttgctgctcaggcctcacagccaaccggaatcgcagcactagagtccctcaccgccccactcgagtgcggtatcacttcaaccacttcaactgacaacacacaaagcacaagatgtcccacacgactgccgtcctggtatttcgcatcctcgcgggctgctcctacctcgtcatgctcacgagtccgtcgctcaacatctaccgagtgtacaaggccaagagcgtcggcgtgcagtcgatcttcccgctcgtctcgctgctcgcaaactcccacatctggtgcgtactggtaacagttaaaggcgagaagatgaacgtttacactaacactctacctacgatccgaacaggatgatgtacggttacctcgccaagatctacttccccgtcttctcgtgcttcctggtcggtgacttcgccgccgtcatttacctgtccatctactaccgctactcggataaccgcggctacgtcgttcgctcgatagccacaaccctcgtgatcatcgccatcctgagcgccttcgccatcgtcggcggcctcggatacacgaaccagtctcgccacggcgtcagcacggtgctggggttcttcgccgatatcgccagtctgtgcctgtactgcgcgcccatggagaagctgttccaagtgctcaagcacaagtcggccgtcttcatcaacctgcccatggtgctcgccggctacgccaacaacatgatctggctcacgtacggctcgctcatccagaactggttcatgatctccatcaacatcttcttcttctccatgagcaccttcacgctcgtcttgtaccacatctacgaccccaagacgcacccgctcaaggacggctgggacaccaacacgaacgacaactcggaggaggacgacgtgcagctccagatctccgtcgacccctcggacgccgacagcaaggacaagaagagctccaacttgccgagcccgcagtacgaggccatgcgctctccaattgcccccgcacgcgcggattagagaaatacagactttttatttcatcatttcatcggaagagctcgttgtatagatagatctctggaaatcacacatgattgtttgtagccgactgccaacgtttcgagcttgatgctttctgggccttgttgtaactctcaagtctcttcgatgggccgctggcccaagcagcaaagaaagcgagtgggttgctccgtcgcaagaaacgaaccgctaagagatgagctatacagacttttttctccttgttttgtttgttttgtcatttggttggttgcccacttgagggcacgcacgaagagcgcccacggtttcctgctcccaacattcaaactcaaaccactcgatgaagctgtctagagaccgctcgcgaatccgccgcatcgctcttcgttcttatgtcgtttgctcgtgcctttcgctgctccacgtagggtcgtcccgctcgctgtgcatcgggttctctcttgtttctcgcttcactttatcggctgccttccttgggcgaccagcgccaagcccggactaatcgggcggcgtctagatgctgtactcatccgtttcgagcaaagccggcggcggcaggttcttaaaactgttctgctggagcgcgagctgctcaaactgcttggcttcgttgtccagctgcagctccggtgtgaagtcgaagtccttgaacaggcgcttgtcgtccttgtgtccgttcgggttggggcgctgcacctgggcagcgttcgggtccatcaggtcgaaaccccgctccatctcggaaatctcctggtctgtgaatgcctgcgggaagttggacgtgtcgggcacgccggacgggtccttcttgatcttgggctggaacggaggaggcagctcgcgggccttgagcttctcccagttaatgccagcgaagaacgggtggtcgaaaatctcgcggtcgccagtggggccggatcccagtcgctgcttcgggtcgcggtgcagtaatctctggataaggtcgcgcgcgttcggcgacaggtattcggggatcaccaggtggccacgcagaatgttgtggaagagctgcttcttgtcgttcgtgtagaacggcggcagacccgtcagcagctcgaacagcagcgcgccgaccgagtaccaatccaaagcgaaaccgtgaccagatcgagaaagcatttccggggcgagatacatgggggagccgcagaacgtgttggccgacgtgtggtccttgattccctccttagaaataccgaagtcagtcagcagacagtgaccgtccagatccatcacaacgttctcaggcttcaggtcacggaacacaatgttcttcgagtgaaggtgcgacagggccagcgcgatctcgccaatgtagaaagcggcctcgctctcggtgaaagccttccgtcgagtaagcgccgagagcaaatcgccaccgccacagtactccatcaccaagaatagtcggtcctgcgactggaacgcgtagtacagggtcacgatgtacgggtggtccgagcatgcctgcagcgctgccttctctgtgtggatgtactgagcctggttcttctgcacgatagcctgcttgttgtacgccttaagcgcgtaccacttgtcgcggttcgagcccttgccacggaccagatacaccttggcaaatgcaccacgaccaaggaccttgacgaactcgaaatcacgcgggccaagagcgagatccttctggtacttgttcttgaatgccaagtggctgacctgcgtcgcgttgccctcgcgcgcagccatctcgttgcgaggcttcgggggctgcgaagggttcgtagctgccaggttggagccgctgccgagcagcacacggatcgggtggccaatgggcgacagatgcacgggaagactgccgctggcattcggtgcatcaatacgagcgccacgcgccaccagcaacttggccgtggggatatcgcccgactctgctgccatgtgaatagcagcgttgccctggtagtctgtcacgttggggtccgcacctgcatccagaagctccttcacgcagctgtgtatccacataacaaacacaaatcccggtcagtacaaagattcaaccactccacaccccgcataataatacgcagcacttactcaacgttgccggcctggacagcaatgtgcagcgccgtgtagctgtctcccgttcgtgcagacgagtcggcgccacgcgccagcagctccttcacagcgttcgggtggttgttgcgcgcggccaggtgcagcgccgacgtctggttgatgcccacgccgttcacgtccacgacgttgtcccgcagcagcgtcgcaatcaggtgccagttgcccacttcggccgcgtcgaagagctggaactgcttcttcttgacgtctcgcaggtccaggatcatctgcggcgccgtggagcgcagcttgccggctccgaccgcgggggcgtccaccgagcgtcctccgttcgtctcgagctcgtggatcacctggtccttcatggtcaactgctcgcgcagcgaccggttctcctccagcagctgcttgatgacgatgtccttggggtccgacgacttgtcggcgccgcgcacgatctcgtggtcctccagcatgctcgggcgcgagtagtccgtctccatggcgcccgcctgcatcatgccggccaggccggcggtgacgccggggccgcccgaggcgccgaggttcacgccgccgctgggcgccgagtcgtggaagctgccgcgcatctggctcttcttgagcgcgttgatgtgcgccctgacggacttgacccagtcctccatctcgcgcgccgtgctggcctggcagaacatcttcttggtgggggtcacgacctcgaagcagttggccttgtcgtcgatgttgctcttgcgcacgatcgtgtcgggcgtgagctccagctcgcccttgaggtgcacgatgtcctccttgcccgtgttgaagaagccgccgccctgcttgtagtacgacaagtggccctcggccagcacgaagaagcgctccttccagttggcgaacgcgtccatgctcgacatggcgcgcttggtcaggaagcccgtcttgctggacacgaagcccgccgcgtcgtccttgaacgacgccgacaccatgtgctggcccggcgtcgtggccggggacgacgacagcagcgccgccgcgctcgcgggcttgccgaagctgatggtgttgcgcccgttggggccgaaggcgccgccgcccacggggctcatgccgccgaacgcgccgccgccgccgctgccgctggacagcgcctcgccctggctgttgccgcggcgccgcgccttggtgaagcgcttgccgatggcgccgcgctcgccggggctgcgcatgctgccgctgctgctggacatcgggcggacgaaggagaagacacgaggccgctgtcttctgtcttgctcttccttctttcgcttttgggccgcccttatcccctccccctgtggagctgtgcgtattttgaggtcaaaaatttgagatttggtcctgggggaccaaacgactgggcgattgtatgtgggatccaacgtggcggtggattcttttgggtgcggggcaccccccgattggcccgtatccggccatatggcgtgactggatttcagtatggagcgtcttgaagtcggggcagtaatgaacacgccttcactctatgcatgtgtgcatcgtgagagaaagttacgagttttgtgccctttgtattgcgtcgcaagcaggttgggggcgctcggctgctatcagcgccagatgggctttattttgcgcagtccagcgtggggtcgtcgtggcgcgacccaaaaagatgttcctagtcctttggtccgtccgcctcggtcgtgtgcgatccggcgatggcaaaagggtgtgaggaacgggagctgtaccgtactgtactctacatctaaagtttctccgcatgaagacaaaccgaagcctcacacgcagccaaaggacactgcgaccgcatttacgatcgcggattgtcgacgatgaatgcatcccactattgcttacacggacggtaggaccgcgtgtgcatcaccatgagtgtagcaactacagtaccgccggtgccgtcttcatcgccatgaccaggtcatcgcgaacctcttgatccgaaatgcgtgcaaaacaatttgttgcatgtatttttgatacctgcgcagggacgcttggaggatatataagcttcaaacgcgttgggatccattcccgctcaagcacgagtatgaaccgtagtctgtagccgactcagaggtcatgtcattgaaaaaaaatacagaagagctgttcagaacagaaggcaacgagttcatattttatcaataggctctaagcttagtaagagttgtgtgggtgtagtagatatcttagcgcagaggagttgacgcattgagcttctggtcgccggacacgtcgatcacgacgaactcttcgtcgttggcatccgcatcttccttgagcgggaacttcttcaagtctacgccctcgtccgccaccttcttgtcctagccttcctccagcgggtgggtcttggggtcgtagatgtggtacacgaccagcgtgaacgagttcatggagaagaagaagatgttgatggagatcatgaaccagttgcccagcagactgccgaacgtgagccagatgacgttcatgtagcccgcgagcaccatgggcaggttcatgaaggccgcggacttgtgcttgagcaccatgtagagcttctccatcggcgcacagtacaggcagacgctggcgatgtcggcgaagaaccccaagaccgtgctcacctcgtggcgcgtctggttcgtgaccccaaagccgccgagaatggcgtacaatgtcagcacaaagaggatcacgactgttgtgacgattgagcggataagatatcgcttgttatccgagtagtgatagtagatgaccaggtagatgacagcggcaaagtccccgacgaggaagcaggagaagacgggaaagtaaatcttggccaggtagccgtacatcatcctgaacaataaatgaacagagattattgtggaaaccgattagattgcccgagcggattagctgataaagcagcgttcatgagagatttgattggtactaaatcggggatccttatgatttcatgtggcattggtaagggtataaatcggtgtaaggttaataaaatgggggttgcctcattacccgccagaaatacgacgagcgaccacttaccgccacgagctgagtgattcgcgtacctactaacgaaaaatagcatcgcgtgcattaaatacgcttctgtgagcttcgatgtgtactgcattctattatcaagttctgaagtcatgtatttgcgctgtcatttctcgtcagcattagcgtttgtcggttttacgttaaatcggccaccgaatgccgtgtgggtgtcggacattcgggctgattagcatgcaaatcagccgtcccgggctttgtaagccgtggagcagctaaatcagcttgccacatggcgttgtaggcacaactgaccgctctgtcaaatcagagtacaaatcttagtctttcgatctaattaggaggtcggatttagcaaatcagaccccattaagcttcatcatctgcttaatcaaccgatttatatcccaattagacaatctaatcggtttccacaatagaaaatgtctatccgtcataacactaaccagaggtgcgagttggcgagcagagcaacgagtgggaagatggattgctgttgaatgaagaggcgcgccgagcgcgccccgctcgcagagtggcagcaggcttcgcctgtctgccagtcgagttattttgcaactgaaagcaaaccctctcaaacatgttattattgttttagcaagtacgagagaagttcagatcgccagctgtggtctggatagtgcagcagagatctgcctgccaaccatacatagtgcgatgacgacacgaggccgaggagtgaggagtcgaggacgcagtccgaagacgagctcacctcctcttttgcctccaggtacccagcacggatctagagtagtaggcataggaatagaggataaccaaaagagtaatacattgtagtgagctacctactctgtgtaaactgttcatttcaacatttcaagtacaatgagcaagctccaggttgtcatgtcgtcggtcgactcgctgaagctcaacgggaagtccctgcacttagctgcgtggaagagcaggttgatcatccacctcagggcgctgagtgagcaacgcgcgctcgaggagctgcagcacaagcgtgcaaagccgctgacgcgcttcgaggatctggtcgtaagccagccggagctgccgccacgctcgcccgcggcggacaaagaggtgacatggcagcacgatttgcacgagacgctgctgaatcagcagtcgtcgtacatcaagcggctgctgtgtgaaacgctgccgggcggtttcaagggaatcgcgaccaagcaaatggacgagccggtccatgtgatttggcggcttgttgagaagcggtacagcctcagcaacgcggcaggcgtcgtcgggctggtacagcagttcctggaggtggtgaacgccgacttcaagagcgttggccagctcttacaagacctcaacaccgtgcgcagccaggtcaaagtgaacgcgcacgaggctctgcatacgcacatgatcacgtcgaagatgatgctggtcatggtgctcggtgtgcttccgaggcacatgtggggctcctccgtcaagttcacggaggagagcttcacactggagaaggtgagcgagaagcttgccaacatctttgacaacaagaccaagagcgaaattatggcgctggctagcggcagggtggtcaaccacgtcaagtcgaccccagccaagacggctccaacaaatccgaagggatccgttctgggcaagcgaaaggccgcagacggtccgatcatcgacgaccactacaacgtcgggtacatgaggtgccactactgcgcaggcgcgcaaaacgatcgggatggcattggcccacacaagatgcttgactgccccgcgcgtcgcgcagacagggctgcgggtgtgtttcgccgcaacgtgtggacgtacccaagccgcaggctcgcaaggaagtgcacgagcctacacccaagatgaatggcaatggaaagggtaagggtaaggccaaggccaaggccaaggagcgtcgtgaaatcccattggctgagtgcctggccaaagtcgtggcggtagacgcgtgcgacgcgcagcaagattcgctgcccgcgaccccggatgggtacacgagcccgcacccaagcaactttcagcagcctgacacgccgggaaaggacgcttcgccgatgagcgacgaagacgagccaatggagagcgtcgtcaacgccgtgaaagctgacgcttcgggcacggctccagccgccgctaagcaatcggacgacgacgtggacatggaaggacagccaagcgagggcagcaatctagagattgccgaggcgacgaagagcttcgccagcatgctgactgacctcgagaaaaaggtgcgaagtttgtattcatttctgttagacgatgattcgtatctaaccacaaattcttgggtacttaactcagggtgcgggcacgggctaaccagcgaggcagtgcggtttgtgcagaaggagcccaacaaccagtacatgtttacattcgcacaggctctaagcattcaaacacatcttggcacgataaaattgtatttgcatggtccacaaggaattagaccttttctgttcgaaaatattgcgttagtaccggacgctacctcgaacattctgagcgagttctggctcaggcgcggtgggtaccagatatatggttccctaactggcgagtacaaatttgtgttctttgccaatgaattagtgtttgttgcaaaagcaattaacggggcatactatatacagaataaaacactgcaagagcgtcaactactgtgcaacgcagtgaaacaggagccctgtaaaccactagctcgcctaggtactgagaggttagagcgcacactgcaggagtggcatgttaagctgggccaccttaataaggatgcattaattgcaatgttaagcacaaaagtggtgactggaatgccaaaaatttccgcaccaggtctaagaaagatcccattcttttgcacaacttgtgcagagatgaagaagaggagaatgtcctaccggaatgcaaagggctcgagagatgagaacccaatcagcaccattcatatggacacaaacggccccatgaagatcataggggtgtatggcatctgcgggaaaatcaaatacttcctgagtatcattgacgacaacacgtcgtggcgctggacctacgtcctacgctgtaagaaagaagtctttgagaaagtagaggagctacttttgcaccttgagcgtgagggaaagttcacgattcgtcggatccggtccgatggaggaactgagtttgtgaatgcagcttttaaaagcttctgtaaaggcaaaggcatcgtattccagacatccaacgcctacagccccgaagaaaacggagctgcagagcgaggccaccagagcaaactggatagagttcgttgcgcgttgaaagacgcagctatggaacacaggtggtggccagaggcgctcatgtacatgacttatgtgcagaatcgcacacccatggcacgtttgggaaacaagacaccgtatgagatggtgtatggggagcctcccaacgtgagcaagctacctgtgtggggatgtgtgtgctttgcgcacgttcctgccgccctaagaaaggacaaaaagctgtctgctcgcgccgaaaagtgccggtttctcggaatatctgaggaaacgaagggttatagactctgggacatgtataacaacaagcacatcttatcgcgtgatgacgaccaatgtagccaccatggttcagcgagctttcggtcaggccgaagagcccctcacaattgaatctgccgcgcgcgagccacccgcagcagatggaaaccaaacactagccaccgagtctacggaggcagtgggagctgaagcacttgccgacgggtccacggcagtagtgggagctgaatcatgagcacaggggtctactgaggcagtgggagctgaagcagctactgaaaacagtaacccagcagtgggagctcaaaagaaacgccaacgtgtgggactcgtcgatacgccacagaggcgtgaatcccgcccacgtagagaggcgaagaagccgaagagatacgcggactattagtgcttccaggcgatgctagataagaacattgcgcaggacatactagagcacaaagtgccgacaccacggtcgctcaaagcagccttaagtggaccacatagagagcaatggaaataagctctggaacttgagtacgactccttgatcgagaatgggacgtggagactcgtaaaactgccacccggacgtaaggttttgccctgtcactgggtactagtagtaaagtataacgccgacgggactgtcgagcggttcaaagcacgcctcgtagcacagggcaaccaccaggagtttggggtagactgtgatgaggtatacgcacccgtggcacgatttgagtcgctgcgcctagtgctggcgatagggacgatattggactgtcacatccaccagatggatgtccatacggcgtttttgaacggcacgatggaaggagagcaaaagatctacatgaggcaacctcacggttttgcgaagcgaggccaagagcacttggtctgtgaacttctgaagagcatctatggcctgaaacaagctccgcgcatctggtataaagtcctacatacctttttgacgtcgatgggttttgcacgctgccacaaagcgttttgcatctacgtgcaaaaagtgggagtagattggatcatagtcctggtctatgtcgatgatctgacgatcatgtcgctgaacatgcgactcattgatgggctcaaagccgagttgtcaaaacggttcaagatgaaagaccttggcgacattcactacatcctcaagatggaggtaactcgcaataggaaccagcgtgtgatgatgatctcacagcgcaagtacattgcagagctgatcacgaagtacaaactggtcgatagctcgccggtgatgacaccgcaagcacctggcctcgtactcgagccagagacggacatgagcgcagagccggttgctgcgcagccttacgactacagaggcattgttggatcactccaatatttggtccgtgggacacgactggacatcgccaacgcggttagagaattgagcaaatttctgtcttgttacaaccgcgcgcactgggaagcggctaggcgagtactcaaatacttgaaagggacgtcaacgtacggtctgtttctcgaaggaaaaacgagagacgtgacttacgaagtgtacactgacgcgagctttgcgtgtcaacctaaagaacgtaaatccgtagcagggtacgtaatccaaatggccggagccagtgtgtcatggtgtagtagcaagcagggaggcgtgtcgctctctactgctgaagccgaactcatcgcactaagtgagggagctaaagaaagtgagtggttgtggcacttgctgggagaaatggggtttcctcaaaaagtaccagtgcaggtatggtgtgacagcaacgctgccatcagcattgtgaaaaatcctggaaatcacaaagcaaacaaacacatcgagatccgctacctgtttacgagggacctggttgaacttcgccgcctcaagatagcttactgctctacagcagaaatgactgcggatattctcactaaagctctccccacaaaacaattcctgaaactaagagagaaactaggagtgcgagatctgaaactttaccctagtacttagtgggagtgttgaatgaagaggcgcgccgagcgcgccccgctcgcagagtggcagcaggcttcgcctgtctgccagtcgagttattttgcaactgaaagcaaaccctctcaaacatgttattattgttttagcaagtacgagagaagttcagatcgccagctgtgtgcagcagagagctgcctgccaaccatacatagtgcgatgacgacacgaggccgaggagtgaggagtcgaggacgcagtccgaagacgagctcacttcctcttttgcctccaggtacccagcacggatctagagtagtaggcataggaatagaggataaccaaaagagtaatacattgtagtgagctacctactctgtgtaaactgttcctttcaacaattggacgccgacgctttgggccttgtgcacgcggtaaatgttgagcgacgggctgctgagcatcacgaggtaggaacacccggcgaggatgcggaacaccagcaacgcggttgcgtgcgacattgtgggcgctggtatgtggggcgactacaacgctgcttgatcgatgcttggccacacttgtattggaatttgagtaatgatcatctcgtgagacttgaatccattcagccacggcctcggatggaagtggcggcggcgcaataaaacgctccagagcgactgaggatccgttggtcgtcctcgcgactgagcgagaatagctactttcagcttttgttgcgtctcactgggtcaattcggagctgagcagggtcaagaccacaggaaggttgattacaggaaagattgcaaagttaagcaacatccaaccccatgtgaagtccaagccttgggcgtcaccttggatggctataattgagtatttgtcttcatacagatgtctccaaataatagttcgatacttaaagtaaagtatacttaaccatgcgtttctgcaaaaaaaagttgtgccctactgcagttaatccgcgatagctggctccacacgcaagtggttgacttcgtggtgcggaattggtggttccatgatgaccttgtcgctcttcatgtcaggtaccttcttcagatcctccgaaacatccacggacacttggatgtggaagtcgtcgacctttgagcttctgcttgagattgcgtcccagccgtccttgagcggatgcgtcttcgggttgtagatctggtacaccacgagagtgatcgagttcatggtgaagaagaaaatgttgatcgagatcatgaaataattctggatcaagctgccgaacgtgagccagatcatgttgttcatgtagccggcgagcaccatgggcaggtcgatgaagaccgcggacttgtgcttgagcaccatgtagagcttctccatcggcgcacagtacaagcagacactggcgatgtcagcgaagaaaccgagtaccgtgctgacatcgtgtcgggactggttcgtgtgcccaagtccgccagctattgcatacgcgcttagaattgcgaggatggccagcactgcagcgatggagcgaatcacgtagctgtggttgttcgagtagcggtagtagatggtgaggtaaatcacggctgcgaagtcgcccatgaggaagcaggagaacacgggaaagtaaatcttggccaggtagccgtacatcatcctgttcagaagtggcaagagttattagtgtgtgtgtgtgtgtgtgtgtggttaagttgattaatgcagagatcaaactaccataggtgggagtttgcgagcaaagcgacaagcggaaaaatcgactgcacgcccacgctctttgccttgtgcacgcggtagatgttgagcgacgggctgctgagcatcacgaggtaggagcagcctgccaggacgcgaaaggccaagacagcggcttcgtgggacatattcgatgcagtcgagatgactttagtagctgaatgtttccacttgagcttgaagaagtgctatgagcagttgctagagtgagcaacaggttgggctgtgtgcagcttggagcaaaccagtgagtgagctatctcgaggggaaatctgcccttgcataagcctagttcaagccacacgctgaaaatggcggcggcaacttcacgcgcaccgccaaagttgtcctcagggctgggcatgcactgcgtatcacttccgcgtgtgcccattttggattgcgatcctcgctgcaagatcgatcatcaatgagcttcaatggcggacagcgaattgttatcgacaccagcccgaatctaccgccgtctcccagattttggtgtcattcattcttcagaaaaaaacaccaaccgtcatgaggcttcaggtcgtcacactagtgttgcagctccacgaaggtgtgagcgcactggagcacgtttctgatgttatttcttcctacctggggcccccgcccaatctgtcgctagctcgagcttgcacgttcgggtcgacgccgctgctggactggatctgggagagtagctgcacgactgaagttgacaggaagcctaactggacgttgacgaactacctgcgatcggagattcgctacggggaatggcagttcaacgagcctatggttgtcgctgcgcagagagggaatttggctatcttgcagtggcttcttgaccactattcggaatgcagcgttgataaaacggtggtggaagcagccgcacaagcagggcgctgcaatttctacaccaacaaggtgccacatttggtcagccatcctggcgaacccacccaagtctggggagctggagagtgcgcgagttgaatgtggctgctgtatttggccattcagacatcatccgatggcgcatgaagaacaagacactattgatggccaagcaacaagagatctcctcgtttatagtgcggcggggcgtggagatgtgtccctgttggaatttctcctcaagcacgggtttcactacaacgaagaatacctcgctcaagacgctacaggcgccgtgatcgagtggcttctggagagaacccctcgaacccaaaactcggaagtcgtccggccactactgctggcagctgcaaaggaagggcgagctgatcttatagcaagaatcgctgcggggagttttcctcgtagaaagaatttgtgtcgggagctggagctttgctgtgagaataccctggtggtcgcgtgcagatatggacaacttgacgtggtgcagatgatgctagacttttgggcttagctttcagctcggtcttagccacccgaccgtgatgcgcgatgcagcggcgcttggccatctcaaggtggcaaagttgctgcaagcgcgctgtggactgcgcgtcaaccgagaagaggccatcttcttagcagcagcaaatggacatttggatgtggtgcagtggctgtatgagacgcctgcagccacgtcgtctggcgcgttccatcctggccctgcttggtttggtaaaatctacgttcaagacgaccccatagtcaaggacctgcaaacttccagtgcaaaacctgcgactgcgatggacgcagctgcaatatttgggcacttggacgtcgttcggtatcttcatggcgcgataacgtcacggggcacaaagcggaaatttagagggtggaggtcgcttgatcccacgcgcaactacgacggcgatggacggcgcggctgcaatggggcatttggaagttgtaaagtggctgcacgcgcgtcggagcgaggggtgcacgatgcgtgcgctggacggagcaatagcaaacaaccacttcgatgtgatggagtggctctttgccaatcggtcggacgggttctcactggcagcgctctgctccgaaacggaagagctcacttctcttcgctcgctgcagtggtgcgtcaacattggcggaagtgaactcgcttgtgctgttgattggggggattttctggtacgctacgcacgacgcggggttttaccagtagtgcagtggcttctggaggagtttccgagctgtgcggaatcgatagagtctgccatttcagagtccttgagcgcgggcgtgctcgatatggtactctttctggactgggtctccccacgaacactggacttccccgtcgacgagaataatattttcaacaacctgtggtggttggcaaacccaccacctgtaaaaagcttaactaggcgccactactggattcccaagatcgggcatgggattggctgcctggctttcctgggctgccagcaatggcaggtaagggcaggcagtagattagtatcagttctcaattagctccccaaggaacaagcaatagacgttgttcttggtgggagttccagctcccaatctaccgtgttatacttgcctcaaggtgcaacacgtcacacaaccacattcggttgtggatgtacaagaaggctgcgcgcgtgtttgaggcttactggaaaatgttggagagcgcaggacagtgagtttcgtttatacgtactgtcttgaataggaatattatctagtcttctgctcgtccctccacaaacaatcgatacgtttcagacaccacggtggtgtcgtctcgctctcccatgtaatacatgcttccttgtcgtccttcttagacctgcacatcttggccccgctacgttttaaatctgctctgttactaccggtaatagcagcgagcggaagcctcatggactcttaatcttaagcaactgcctccgtccactacgtctgacaccagttcgaacaagaaaccatggttgctgcagggcgtgaagctgtccaaattttggcgtggtcgctcaagcattgcccagattcgaactgaacgagtcagtgatagaggcggcagtgaaagctcgttgtgcttcattttctttgtgattattgcatcgagataataatgtcattttcatcaggaaggagaagcgtcagacgttcaacaagtgcgttgcctggtagggccaaacgctgagcttggcatcggaaagtaggcactcggaggtcgtgatatggtacatcgagcggagcattatctcggggcgatttcggggccatttggactacgaatcaggcaggtcaggccgtgaataggcgtccgaaatgagcggtgccatcggacgaaagctgattgcagaaacgaaggtctgtttgtgggggggtctggggctagaagggttaaataggccactgccacggaagctgatctctgccaaggctcccaacgcagcgtcccaggttctctgttctccccccattgtccagcttgtttacagcagaagagctccaactgactgacatgaagctgaaggccgtcacgctggtgctggggcgccacgatggagtcaactcactggaagacgtttctggtgctatctcttcctacctgggccccccgcccaacctgtcgctagcgcaagcttgtacgttcgggtcgacgtcgctgctggattggatctgggcgagtagctgctcaactgaagctgacaggaagcctaactggaagttgacgaactaccttcggtcccatgctggctacagcaagtggcaattcaccgaggctatgactgtggctgcagccacaggagacgtcgacgtgttgatctggctactggagcactctccaggttttaaagtggaggcgtccgtggtggaggcagcagcaaaagctggtcagttatccgcgctgcagctcctgagccaagagtgcgccgcgccacaaccaggcactggaaatcaagagacccagcgtcgttacagtcgtgtgacacacgactgtaacgactcgtgtggtaatgtgggggtcttgcgcattgatactcgcctcatggtcggacaagtcggaggttgtgaagtggttgctggagcgtggcgtttccaccgtttcggctgaggaatgcacgagtctggtctcaaatgcagcagagaacggagatgttgtgttggtgcaatggctcatcgcgcatgacaagcattacatcgatcaacatatcgctggggatgacactggtgacgacgtgttgcagtggcttctggccaggagcagtgacgagaactacctgccactcttgcggcacttgctgtgcgcctcgacggcaagtggccgcattgattttgtcaagagaattatcgagctccgtcagtctcacgcccaacagtacgaagatgagctggagcaagcgtttgtggtggcgtgttctagcgggcagctcgaagttgtgaagtggatactggaccagggtctcgggcgtcgcatggacaagtatccgtctgacgttatgcataatgcagcctcacgcggtcacctcgccattgcaaaattgctccacaaccaacgcggacaccaagtcagcgcagctgagacgatgttttacgcggcgggttatgggcatctagcagtggtgcagtggcttcatgaattattcggggaagctacacctggtgggatattccaaagtctgccgacctcttctgtctgctcgtggaccaaactcggtggtctgtttctggggattggtgagttcgaggagagacctacgaccgcactggatgctgccgcaacgtttggacacacaaacagccaacgctatattgaatcagacgagaagtcgtccgctcgattgtcaatgagccaatccactccgtcgacgtgccggttattcgcagcctcaaccagcactagaactgagcatctcgtgtgttcattttcatgtagccactttacaacctccaagtgtccaaatactgtagctccatccatggcgttgtgagttgtcatcggcagatcacgagctgtcatgggcaaagtcaagtcgagatgcggagcccaattcgaccggacgtttcgtagaaactgcaaaacgtccaagtgtccaaacatcgctgcggcgtccatcgccgttgctggccgaatcgatgtgacatcggaaagagttgtcaatggattattggtcacatttgccgcatcgcctgggtcccgacgtggttggtcatccaattcccgacatctacatcccataggggtcccacgttcatgaccgggtcgacattgttgacatggtccagatccacctcactctggcgcgactggaacatcctgatgccagtctgggtagcaaacttgttgtacagccactccacgacatccaaatgtccattcgcagctgccagcaacatggtgactgccaaatcgctgatccgcgctttgtagcggctgcgaagcagtttagcaacctgcagatgtccattggaagctacgtcgtccaaaactcctgacgacaccccaaagactttatagcgatgatccccttgatggctttgctcgattgagtgtctccactcaacaacagccagttgtccaagtctacacgcttgttccagtgccgagcaatacaggcgtcaccttccccttcacagcaggtctcagctaaaatgacgagtatctccagcatatccactcggccgacacgtgcagcggcgtggacggcaccacaaagaaagctgcgtacttcctggcgagagctccgtgagaagaagttgttgtgaccacgcctggcgacaatccactccaaaactttaccagggaccgagcgcagaacagaagacatcgtaattgaaccctcttgcctcaagccactccagcagcgcaatgtttccatgtctggcagcgtctgcggccaacgtgttcgctatctcgtcatcaattgaaatggcgcggtcgaccagccactgcacaacttctgagtgaccatttctcgacgccaacgtcagcgaatcatcatcaaaagttaaagtacgcgcctcctttccaaccgagtcatcataacccagcagcgactgcagcacgggcagatggccagcggccgctgcacctttcaccactttttcctccacctcaaaacctggaaaatgctccagaagccactcaaggacttcagtattttcacttttcgccacaactgccagtgccttggaaaactcccacgggctgtagtgagcttccgaccgcaggtagttccccagcgaccagttcgaagtcctgttactcttcactgtgcagctcgagttccaaatcaagtccagcagcttagtcgacatgaactcacatgctcgcgctagcgtcaggttgggtgacggccccaggaacgaagacacaagcgggtagatatcgtctagggagttcttgccatcatgctcctggagaacgtgactgacagcggtgaacgacatggccaagtgtgctgtaaattggagaatcagacaaaaccacaatcccgttgggatgggtcggtttctttctttgatggagaagaacttttcttctcctgaccaatttagtttctctccttgacaaccatgattctaacggctgtcacgcttgcgctgcgccagcaccatggggtttgcccgctccagcacattttcgtccaggtgtcttcgtacctggggcccccacccaatttatcgcttcttgaagcgtgcaagcttgactcgaccagctggatttgggagagtagctgcacgtcgaagtctgacaggaagccgaattggacactcgccaactacttgcggtcggaagaaagctacggcagcatgcagtattttttggcgctggatgtcgctgcgaagcgcggcaacgtgcaggtggtgcagtggcttgttgagcactttccaggttatcaagcagggcctccgaatatggcatttttatttagtaggttgggcgttgctgaataaattatcccctgacgctccccaacgtacccaataaataatgccattatgaaaagcatgaagtctattaacaagacaccagttagcgtatcatctagctcaaattgtccacagtcgttgcatccaagtacgaccgattctggcggagaaacaaaatcgtctcaagcgtgcgtggcagcaggccgtgtcgttgatgaccaaacgtcacccgagcaatgctgaagaagcgttccaccacgttcgacgcgggtgggatgctcttcagctgctcatacttgacacggtcctgtgcaagctgccggcgcttccgaagacgctccacgaacgacgcggctggatcctccttctcctcactcgcggccacgtcgtccggtccggcagcttcaaagggctgcaaagcggccttttcagcacgcgtcagccgctgcgccttcccgcggagaccgcgtacacacccagcctcaaaatctgggctgtgcacaatgttggcccgaggccctgcaaaataaaaaccattatacaattgttagtgaaaatattaaacacaaattaccaatgtagcgcccatattgtggcttgacggcgatcagctcgtcgaaccactcgcgaacgtccagcaggtcgacgtcgtggccttgaagggccttcgagaccgactcgatatcgcacagctcctggtacaatgcccgcagtcgcttgttcatcgccagcggcggcagcaggtccatgaggtcgtcgtcttcggcgtcaagaaactcgaggagctggaggtagcgccgtaccatctcgaacgtagagctccagcgcgtgtcctggcgaatgacaggccgaagtggcgttttcaacctattttgtaaaacaattacaaaagtacacaaattgtgttagatacatattgacacaccacacatagacattggcgtttacagtagtttggcagattgggtgagagtacgcaattttaccatgagcgcctgcacagcagccaagtcctcctcatgcgacgccatgtccgcctgaaccttgctgttcaggcggtggcttgcgcaaccaacaagcggcacactcataagagttgccagccgccggtttacggcgcagttgtcagctacgaggaagcgacactgcgccagctgtacgccgtaatcgcgcggcagcatggtcgctagaaactcgagatggccctgcgcggagagatcgtcgtccagcgcgtccagcagcggggccatgctgagtagcgttgtcttgggacagccgttcacctcatagcacgcgaacacggcgatgtagtgctcagatgcgtgtccagccgtcgagcatgatgccgaagcgcgctgggagctccgacgcaattaaacgctcgacggcgacgacgaccccgtccatgccagcccgcagggtttcctccgagatggggtccaggctggagtagctgaataacatccgtaaagtaaagttgttagtttccgtagtaatgtaaacacaatgaccttatgcatacacgtaccgccgagcttctcggctctcacaaaaagagagtggcaggttgcacataacaatccaaaccatccagtcgtggaggttgagcgccgagtggcggacgaagttcacgagggagcctgtctccgctgtcgtagcgtcgagcatgacggtctcgtagtcagggtgctcccgcctgatatgttgcatcaggttggagtacccgttcctatgggtttgcttccgaaccgtgccgcaacagcaacggaaatactcgagaatcacctcgtcgttctcgtcgcgacacgggcggaagtaaacccccgagacttgggagttcgtgtaggtagggcgaggggggcggatagcgcgaaccatgctggatgaggtcttggaggcttgagaagtgaaaattgaaaagtgagcgctgccaaatgagctgcaactagcaacgcagacaaccagtgattccagttctactgaacgactggaagcgagaagatggctggtataacgctaacattattatataaaggtaactgtgataaattatgtaatatcacaaagcacatcaataaattatcacggtagatggctgaacccgccgaaatgcgtaatttattgttattttctgaaataatgttattgacaatgctattttcggaggcccttggatcggtggtaaaagcagcagccaaggcaggtcatctatgtgtgctccaattcctctacgacatgtgcgaccacgagacaagcttcttgccgtcgagaggggacgagccgccgccatacaacaacctggttgaatggagaaagaaagcgttgacttcggcttcctggaatgatcactttgaagttgtgcagtggctcgttgagatcgggtttccgttcaatgagaattcgttgctgaaagatgcagcagtgggtgcaaatgcggatctactggagtggctgcttgagtacaggagcgtgcacgaagagaatgtcgcgagtggcattttgaaggcattttttctaagagtgatagcttccgaggagttggattgcagcggctagactcggacgagttgatctcctggagaagattattgagcgtctccctcaggagtatattgatactgatgaggcatttggtgaaccgttgatgatggcgagcaagcacggacagttaaacgctgtgctgtggatggtcgacaacgggtatgcggagaactctcaatgtggcgttgcacgaggtttcatggatgcagttgctcatggccaccttgaagtcgcgaagttccttcaagctcgctatgatatcggtgacaatgaagtagactcgggggtgattttgttctctgctgcaacttacggtcatctccatgcagtgcagtggctgtatgagaattttgcagacttccgagtccctatcgatatgtttccatgcgccacttcgcttgacgcctcttgatgctgtcgcgctaactgaatggaaaaattgcactacttccaagtgtccgaaaattgctgcagcgtccatgggcgttgttggtgtcacatcggcttcgtcatttacgaggtcgaacagctttgtgtcggtatccactactaacgccatggatggggctgcgacgttaggccacctgggggtcgtaaagtggcttcatgaaaatcgatctgaaggatgcacgcgaagagccttgaaccaagcagcctgcaggaaacagttcgatgtggtggaatggctactatcgaatcggagcgagtttacgccgtccgttaacggtagctcaagaaaagtgtctgtcagagcggctgttgcagtgggtcttggacaatgatcccgatcagttctcaagctgcgatatgccattgctgttttaattattcgtgaacggtgatgaactgcgcggggtgcagtggcttctaacgaagctccggcatcttcttccgagcgatttaagctcgttcaacgaccatgacccactgtaccatttggagaccacattcttcttggactggtacgtcgcgcagaagcagtgaagggagactcgggaatatgcaagcggcaacactcctgcattcgcatggcaacaagatcaagacaaggcgtaatgccacaacgttgaagttgtaggtgcacctccagtgcggcgaaagtcaagagtacctgaacgcctgaacgatagccacactaacacaaagtaaactaagggaagctagctagcgttttagcggtggggttatcagcaaaataaccaattaggacgtttattgttcctcgatgcctgcagtttccgtccgccatgtcactggcggcgcgctagatgagcctgtaggcagccagggtaaaccaacctcccggttctcctcagactgtgcgacgtatcaagcgacccgcttagttcttgcgggcggcggctacggccttcttgacaagggcgctcttctgcttgcgggcgatcatggccttgaagcggtcgaagtcgttgagctcggcgcgcgtcttcttgttctgcagcttcttggcccaggtggacgactcccacttggcgagcgtgtcggccttggccagggccttcttgagcgtcttctcgcgggcctggagggggatgtccaccgtcaggtccgtgagcgagaggcgcttgaagttgatcacgtggcggttcacgcccgtgacgctgaaggggccgtccacgagggccttgttctcgtccaccacgtcgatgatcgtggcgatcttgccggcgtccgggccgtagttgatgagcaccacgcggccaaccgaaacgaagcgagtgaaagtctgccgtgcatcatagtacccacccactgttagcgaatcatgcccatactattgatggcccttgcactgctgtgtgcggcgccctgtatatagaggcccacggccctgcggccaggagacctgaacgcaccattgtagctgggaggaaaaacgccaaacgaactaataagctttgggctgcgcgcgcgggctagtggcccgccatttagaaccagtcatcccaaccctactctcctgcggcggctctcggccaatcatttgcgtcactggcgtgttttacgccagctgactggtggaaaatcgatgtggtgtgcggtacatcaaggataatacggacccagctccccagcgggttggcgtccgcatgttgcgggctgtattgcggagggcgggcacgcggaccaaccaagagcgcgcagcgagggcccattttgacgctaagcgcggtcagtttggaaactttcatcgaggaaggatgccgttcgtcaaggtccttaagaacaaggcgtacttcaagcgctaccaggtcaagtaccgtcgtcgccgcgagggcaagacggactaccgcgcccgcaagcgtcttatcacgcaggacaagaacaagtataactcgcccaagtaccgcctcgtggtgcgcatcaccaacaagcaggtcatctgccagatcgcgtacgccgagatcgatggcgacaagatcctgtgccaagccacgtcggcggagctgccccgctacggcctgaccgtgggcctcaagaactacgccgccgcgtacgccacgggcctgctggtgggccgccgtgtgctgcagaagctcggcctggacgaggactacgagggcaacacggaggtggacggcgagatcgtcaagacggagagcaacggccgcacctacttcgtggaagaggtcgccgacgagaagcgccccttccgctgctacctggactgcggcctgcgcaccaccaccacgggcaaccgtgtgttcggcgcccttaagggtgccgctgacgccggcctggacatcccccacagcgaaaagcgcttccccggctacagccgcgacgacaagagctacgacgctgaggtccaccgcgaccgcatcttcgccgtgcacgttgctgagcacatgaaggagctcgaggaggacgacccggagatgcttgcctcgcactacgccgagtacgtcaaggccaagatcgacccggatgagcttgaggacctgatcaccaaggtgcacgaggccatccgcgaggacccctcgcccgccgccaagaaggaccactcgttcgacaagaagtacaagaagcaggccaagcgttcgctccagcagcgcaaggctcgcgtggcgcagaagaaggcccacgccgcctcgaagcaggagtagatcttgtcgcagggcttgttctagctggctgcttagatctctcttctatcagctagcgaaaatgtccgcgtggtgtagtaatgcaccaactacaacatgatgaaagttcaaacaccttccattcactttacagtccacccttggcgtcttccttgttcatactgaagtgtccatgtcttgattccgtggtgcctccgcttggtgtcctaataggtcgtacttaaccgaccttaatccttacactagccttacctaccaataccattcaagcagccatgtcgttctccatgaagctgccggccgcgaagggcaagaagaagccgctcggcgcgcccttctcgtcagacggcaagcagtacgggctcgtgatcccgaagaaggacgcgaaggagaaggtgcgcgtccaagttgcacggcgtaactctctgtctaccgctcataatttgacgccaaagttgtcgtccccatttcaggagctcgccactggtttcaacgtattcgccagcgccgccgccgccaactccagcaaacagtcggccgccgcagagcaggagacggatgccaggcgacgcgtgggcgccgaggccgcgcgcagtctgcagcagacgcaggtggacaaagtgcgcgcccaagcgctggccgacgacccgtcggtcttcgactacgacgccgtgtacgacgacatgaagagcgcgcgggagagcgaggcgtcgcagcgcgcggccaagcgggaggccgagaagaagaagcccaagtacatcagcacgctgctgcagcaggccaagatccgcgaggtggagaacgagcgcatccgggagcggcgtctggtcaacgagcgcaaggccgacgacgcgctctatggcgacaaggagaagctcgtctccgcgtcgtacaagcgcaaactgcaggagatgcagcgctgggacgcggaggacgcgcgactcgcggcgctggaggagaacgaggacgtcaccaagcagggcgagcacgccatggccggcttttacgccaatctcaacaagaacatcgcaatgggcggctccacggacaacgcgcgcagtgcgtacacggccaaggagaaggcacgggatgagaaagctagtgacgaaccggctagagctgagcgcggacgcgagcgtgatcctgaccgtgagcgcgaggttgcgacgacgcaggacgaacctgcgattaagaagacgaagagcagcggacaaccgagcgaaagtcgatccccgcgtcgtgatgagcgggagaacgttgaggctgacgcttcgtcgacacaaaagcaagagaagcgcgaggaggcgaaaccgagcaaggaggacgccatcgccgctgccagagctcgcttcttggcacgcaaggcgcagcgtcaagctcccggttccacagcttagatacaacaatgaaatacgagctttgcttacgtggtagtgaatgctacatgaacaatttgtctgtcgaagatacttttggtgccaatgctgaagatactttttttctagctgtacttccgcttcaactgcctacataagagtcaaataaatatcaaacgcttctcgatgctttggccgcggcttaatgcaccgactgggtcaagtgctgcagtcccaacagcgatgtggccgccagcagctccagatcttgaagttgcgggatcgggttctcgtcgttcgcgttgctggcgctggctttagagcgcttcctagcggccgagctcttacggcgcttgctgtcgtccaccgaggccggggagctgtgcatggccgaccacgagcgcttgcgaggtgaactcggcgggctcggcacaggcgacggcgacaccagctggtggatgttggccggcacgtccagcttgttgccgcgggggccgccgcggcccgtggacaggaagttcttgacctcgacgccggactggcgcagcaccggctgccagaggcgcttgcgcgcgttcgtgaaccagttcgagagctgcttgacctcaattccggcctcgttggcgagctcctccttctcctcctcgctcgggtacgggtgggcgaagtgctcgggcgagaacatccatgccttcagcacgttcttggcctccgggtggagcgtgcctcggcgcgtgcccttcttgcgcctctgcgcggccgacttctcctgctgctgctgctgcatctgctgctgggaagacatctcctcttcatcggcgctgctggccgcgggcgtggcgctctccagctcgtacgaggtgctggagaacgacggcagccgcagctcgcgggcgggcgcgcgctgcgccgagatggcgaactgcagcccgggcagcgggttcttggccgggttgggcgacgtcacgggcgcgggcttgcccgtgagcacgggcgaggccatggccagcgccatcgtggccgggtcctcgctcgggtccgtgggcgacaggcacagctgcgccgccttggaggacatggcggccggccgctcgggcgtgttggaggcggtcagcaggcgcatggccacgaggcgcgcgtggctcggcggctccatcgtcgtctactacagtgcactgcgggatcggggctttggctttggggcttgcttgcgggtgacgcggcagcttggggaatgagccagccgtgcgtcagctgggtcaaagttgccttttttgtatggacttgactattgacgacacgcagaagggtccggcccaatcagcgcacagcgtgcgacgcggcgttaaaatgcgggacagggaggttgatgtcgcctcgcccctcgtcgtccagtggcgtccggctccttggtggctcgagcactcgggcggcgctcgacagcgggagggatgacgtgcagtaatgtgccggtcgtgcggtcgtggaggaggatacttttttcccctttcacgccactttaaaatggatgcggacgctttcttgatgcgcgtcgactcgactcgactcgactcgacttgactcggcctgcgtggattgcgaagtgaaagggctcgagccgctagagggccgctaggccgcatgctgctggtgtcggtttccttcctggcgccagccctgaaaggcgaggcgaccacccgggccgatctgcacgtctcttggcgacgcggcgacgattagggggcttgtctctggcacgaaaccgccgacagacccctaaaaagcggcttcaggagccttattcggggcgcgcacccctatttccaggctcttcgcgtgatggccatcaaaaatcttctcggagaagtctggcgccttcaaccccgcgagcgcgagctgtttctcagcgagagcgtggcgccgcgctttgcttcttgcctcgacgcgcgagtcagcgcacgacaccgcgaagggacggaatctttccgcaggcgctgcagctttgaccagcagcaactcgcctgtcattcgggccgttacgcgcaacgagcggttgaggtggatgcccatcaagcgccacgcacgagacgtcccttggcccggtccgttaccgtttggaggggcggcggcgactagctagcggccgcgatcctattgacgagcagttaccttgattggcctgcttcaaccacatccatgccagtcaaagggccgtgaaagccgtgaaaggcccaaagcagcctcggtgggccggccgagcaagcgaatgccgatttgcttcgtttcccccaaacgagcgacatgtcccgagggtatcctcgccacgcgcgacgaacgcgcctcgagcccgctgatgccgaacaccagcctaacttcagcatttcgaggtcgaggggcaccgctagagttcgtttcgcagctcgcctcgacctccgagtccattgctcggctgcacacactcagcgacggccacgtagcctccgcgtgagacttcaacctcggggcacagcccatgattcggccgcttcggcttcaatgatcatggtaggctttgcttctctctcgcgccaggtgctcgagcgcacctgggtgcagggccgtattaccagccttgcgcccacaaattgcagtgccgtcgagcatcatatctcattggacccgaagaggtgatctggatttttcagccgaaaagaagcttcgttagtatcgcgacttctttccctgaaataacgccaaataacattttatttcagccaatcatatgtgagatcagtcaaaaataatattgaccactaagcatcgaggaatcctgaatgggagttccggctctcagtcgtacaaattggtcggaaatggagggcggtgacggtccaccgaagggcaagtgccctacatgcctaagctcgtggcgaagtcgaacatggccaagcaccgcaaagtgtgcgggaagaagagcctccgaagtcgcgcaaggctataaaccgcgattcctacgcgaagaacaaggacaaaatcctccagaagctacaggaaaagcgcgtgtacgaccaattccgccacctggaggtacaaaattgttagaatgatatcaattattggtaaatctaacatgcggaatatttagtggctcgtaagtagcttactgagcgcgaggctcagggcgtggaggttgagaaaatggagaaaacggcttggacgccattacccaaaacaaaggacgccgaggatctgatctatggtgtcagtttggatccgaacctatttgcccatttcctcgcggagctgaaggcacgtcgcaaggcaaagcacggccgcggtccgtcgatgatttctcctagagagctctaccgggtggcgattttcgttcttcaccccgacaagcttcgcggccaaatcagcaaatttggagatgagaccgataagttgatgaactactggagcacgacggctaaggctttcaccgtgtttgggaatggacttacggaggacaccgagatgaggcctcaaatcgaacttgacgcaatgacggatgttgagtaccgacttcctccgcttgtagtggacaacctcatataagagcgcccaatcatatcacaggatttggagggccttctcgactccgcttataagttccgcacaaattatttcgatacgtttccaccggtaatatatcgatgcgatggaggttccattcatttcacgcagctacggctgcagcctagagctacctggacacagttgctgccagtactcgctacctatgctagtattaagcgctgctgcggcacacgtatactatacagacgttcggagagtggtttgcttgcatcacgctgttcccatcgactaatgacacatgttaccgagttagactttaataaaaagcttacttcaaaaatgttctaaagccagggcaaagcattgcaacggcactagcctcacgcgggcgcgtgttgctcaaggctttgcagtggcagcctgttgcctgccgcgagatgtcaagcgcgacaggctcgcttaggcggctagcggcgttgtaccaataaagttagcaaagcgcaaaatagtggcagctaatcgactactgataccggtaccagttgccagattcggcataccatttgtgacgggtggtacagtgtactggtatataccctgtccactataagcggaggaagtcggtatatgaactagcggcgccgcgtatccaacgcacgtaaagcaaaagctcgtgctgcgtatgactatgagacgttggtgaccaacttccgtgcctatcgcaagaaggtggagcggtacttgagagcgaaagatcgccatcttgcggaatttcaagctcgaaaggagaaggccaaagccgcacacacggcctaagtgatcaagttgaaagcagttatcgcgaagctcgagcgggttgggccatgtgctaccttccaggagtacacagcgtcctacatcaaggccaagcacgcagctagtacgagtgacaagtagtggggcgtgctatagaagccagacacaagacagatgaattctacgacttttccatctctttaggctgcttaaatgtactttttagtatgaactcgtacattttcgtatgaactcgtactgttcggtattaactcgtagattctggtatgaactcgtacttttcggtatgatcccacttcaaaattcaccatagtcctaagaaaaaattccaatctaaaatcctccagaaaatatgtcgactacctctttttacccaaggtggtcgatcattggccaattaacacaaaataactgccaaatgttgtttcagcaaaaagaagttgcttccgaggacgagcccatacaaagtcctaatacagagattggacttcctcggaccgaaacaacgtctcaaggcggccgaaaatcattttatagggttcgggctatttccatacaaacttcttgatagtgcctaggagaggctactattgaggtgttatttcagtcagagtaagctctacttcttaggatacgtcttaggatagcctcctctcaacaacatgaacacgatgtgcaccccgccgtctcctaccaagcgaccacgaccgtctatcgtgaacagcacctctgctgagctgcgactaattgacaacagcctcgtgaccgtgcgagcgagcgagtaggagccagcaggctgtacgtagctagctgctcgacgggtcgttcgtggatattggcggtgaggcggcgccggagatactacagtctaaacgtcattttcggcattgtttaccatgagcgcgcaatgaagcaacgggccgtcacggtgggcgtgaagtttgatgcactatctgcccgtgttcatcgtttgagtggtgctgaacaggtggtagaagttgaagcagtgcagcgagagcatgttcatgtgggtcatcggttcctgggccgcttcgagctggagcctttgaggccaccccatcgacgggacggtaatgtgaagggggcagtacaatgggtaaatgtatatggcgtacgtgcatgtcaaggtgtcaacatcagcattgactagctatcattgcagcgcaggtagagacagcgagctgtccattagagccaagttcgctgtgaagctcactcactgcgcaacgtgcggacatcggccaaagagatctcgatgaataggtagaagcacatattattcgtccctcatgccagtagaacgctttagttaaaaactttgaaactatgtatcaattcactcttcacttgatcatcgtgagtgctagcgccgcgtgtacctcggctacacactagcgagcgctcagaatgcatacactaacttgctaagaaatggaaagtcagggaacggcacctgcactctatggcgctcctcttacacggcctcgaacagtcgtgtcacagtcgtgtcttgtcggtcgtggtcgggtgctcacgcagaagcagcacggcctcgtccagcgggatggaggggttgccagcaacaatgcgcttgatgatgttcgtcgccgccagcaagtcgtgcactcgactcttggcgttggcgatgccgaagcgaaccttgcgcacctccagcttctcctgcgtgtcggacatcacctggatcgtcgtggcgtccatgtcgttcttgttgcgcgcgtctaccaagactccgcgcgtggtgatgcccagcgacttgagccgcaccatttcgagctcgatggccagagccactcgctcgcagttggcaaagtacagcgagctgtccacgcggacgataatgatgtcgtgcaggccacgagcctcggggaaaagctcgcggtccacgaagctgccgccgtcgagctcccccaggaatgacacgggcgacaccttggtcttccacatcagcgccagcaccgtgcagaaatcgatgcaatcaaaccgtccagcacgcccagaccgagcgtaaggacgaacgaaagcgtccacacccaaaacgcgtcgcgcttgacgcggtagagccacttggcctccttgaactccaccagcgagtaaccggccacgatgatgatcgacgccagagtggcgctcggcaggtagtacagcgggctcgtgagcgtgtacagtgagaggatgacgatcagacacgtgatgattgaggccaactgcgtgtgggcgttcaggaggttcacagctgttcgagacataccaccggtagggggcatggcctggaagaaaccggccacgatgctggcaatgccgagacccgtgagttcctggtccgtgttgatgtcctctccgcgctggatcgccagacgctttgccatggcgatactcgacaggaagaccaccacgacaaccgtcagcgagtgatacaaaacgctgccgaacttgtcgccgtcgatcaggtgcgacgtgaagccgtaccaaggcaccttcgggtcggggaagccgccggggattgcacccgtgagcttcaggggcgaggatcccagcagatatccgacaattccaccgaatatgcacacgaccagcgggccgaggtcgcacatggtgcgtgctaggaagatggccaccagtacgggcttggacttgggcttggtagtctcctgcagacgcttgtcaccgacgtccgagactcggccggccgccgagtgacaggcgtaggcgttctccatactaacgtactgctcttcggagagcgagaagccgtggctgtggatggtgtgggcgttgttcagcaccggcgtgaggagccgctcggtctgctccgaggccttgtcgtcctcctcctccttcttgggcgactcgaaccagggcacccgagaatgcaatacttagattaatatttctaaactgcgggcaaaaattaatcattgtattattgccattaattgctgccaattcgtgcacgaacctgctccaccgtgttgacgtcccacaagtcgcggttgtactgcagacacatcagcatctcgagcatggtgggggagagactcttccgcacgtctgtgagcaccagcttcgccgccgaaaaaaagcgcccgtattcgttggacgtcggcggcacgtaggcgacgtccacgtattgcgagcgcctcggtgccttcctcttcttgaacgccgccttgacgatagagctgttgccgtcctcccgcgctggtgccctttcaagggccgtcgatctaaactcggcacacgccgaccgttccgcggccgtcaacgcctcttcgcgctgaagcttgacgaggcccagttctaaatgcgggttgttgacgatcggaggtcttcacgacctggtcaaaaagacggcgcacagcagacaaagttagcgtagacctctgtagctctttcgtgactccctcgaacatctccaggtccttatccaacgccttgactcgctcgtgctcggcgcgccgcagcaaaagcggctgtacttcgtacttgaccagaaggtcatggcccagcttgattatggcgggctggagcttcacatagcgcgccaccatctcgtacgtgctcgaccacctggtgtcgttcctcaacagaggcgacagatgggagacgcggcgaagcagagcgcggcccttgatcgtccggagcttggtcatcagcgcgtgcaccttcgcaatgagctcgtcctcggtcttgaggaagtccttcaccgccaaattgaatctgtggctagcacattcaatgaaggggatagccccttccttccggccgatgcattggttcatagagcagttgtctcccaccatgaacttcaccgcgctccagggcttgttatagcgagacggcgtgtcagcgatcaggtcgtactgactctgcgcacccatgttttcctcgacctctactggagcgaatgttaacagcaggaagcggcgcgatgagcactcgagatcgtcatagtactcgttgtcagcgccgccaccggtaataccggtactgtcgctgccgcataccgcgaatatcgcgatgtagtgacgaccaccactggtccatccgtctagaacgaggccgaacgatgcagggagctcgcgagcgacgcgcagctctagcagctcgaaaatcagcacgatgtacttggagagggtgtactccgacacgagagagagggaggcgttgaggcgcatgagccgccgctctacgaacgcaaacgggaggcggtcgcagacgacccactcgagccagcggtataggtccctggtccgtgtgctgacgaggtgtaggcgcagcgggttctggcggcgtgacgcctcctgggcctcttgctcgtagttttcgtggttgcgccgcaggtggttcagcaggttcgtgtagccattgcccttcttgtactgcttgtcgcaggatgtacacttgtagaagccgttgccgacatcagtgaaaagatagagcagatttggctgctcgtgaggaccatggtggacacgtggggcgaggggcttgggcggtgaggggtgaagaaagcaaatttgattctgaaggagcctccgctgcgagtggtgcggtgaagtggtgccagatcggcgagtggttggtggtggactcttcggcggacactggtggctgcaacgaactccatctgagcaattcaaatacgaattgtgtgcaattcaaaaataaattgagggtctaaaattattcattgaattaaagtattcgaatgtatttttatgagtattattttttcgggtgccttgactcgaacagctgcatgagcacgggcgacgggaagtagcgcttcttgatgatcttgactgtgaacagatacacgatggagatggcggcgactgcgaaggccgtcaaattggtgtggccgatgtgcttgaagatatggtagaccgtctgcggcgggtagtcctgcgacgcgaacttgatgcccagcgcgttggagaactgcgagagcatgatgagcagaccgccggccgagatgaagccgcccatgaccgggcgcgagaagaagtcggccagctggctcaggttgatcagccgcacgagcagcaggatgcagccgctgaggaaggccatcatgatgcccgtggccacgcgctcgtcctggtcgtcgatgtcctcgaggatggtgccgaccagcagcgacacctcggagccgctggccacggacagcaccgtgctggccgaagatggcgttgaccagcggcgccgtggccgctgtgtagagcccgtggtgggccggcacgttcatgatggtggacagcgacacctcctgcgggatgagcatcatggcgacggtgatgccagccacgacgtcgaacttgaggtcgcgccgcacgtcgtagtgcggcagccagctgaagatcggggcgacgtcctgcgcctgctgcagccacgacttcttgggcagcgcgaagctgtcgctgggccccgactggcacccgagagccaggccatgcgactagcgaaatgcgggtctgcctgggtcgagatgtgtgccgggcggtgccaaatggagagtgagctgagctgagctgctcacgggccttgacacggtcgttgaagcgcgtgttgatgtcaacgacgttagcgatatcattggggggcggaccgtgccaatgagaggtggcagtgcgggcgagtcaaacatggtgcggactaagataccaaatgatcgcaccgccggaaacaattcatccttgcaggtatagcgtcaatgagagtagggtcatatagtgggtagacctcttcttggttttgctactggcagtagagcatcatgttagaaagagcctttcaagagtggatattgaagtgatatacacaaaaacaggcgggtacagttgtccccgcctcaggtgtcatgcactgaaaagacgagttgccttagtgccgtgcggggactgcggtagctgtagcgactgcagcgcatggagcgcagaaccatcacctccacgccagaacgcatcagccggacgtggttgcgcgaacgcgaagcccttgcatccgctgaacgccatcgaatgctgctcagctccttggctgagaaccgccggggatgcagtttgaggtccattcgtcagcggtacagccgtcagtacatgtctgtgtcaaacgcacccttcaaacggaaatgcaacttctagcgagtatgaagctgagcgtgtgcatgtagtccgcgacggcagttctcatccgcacatgcatgtttcacggtctgtgtacattctggtgcaaagtaaagcaaagcactaacatcgtttttatttttatttgagtgtggtcggcgccgacaccaaaaaaaccaaacgttgtggcgacgagcgtaatactacgagtactggtatacgagtaacgttgattatctgagtaaacaggtatttactaccagagagccttcttagtgaagaggggtcaatgaatagtgtgaatttccctagtcttggagcatgaagcttgatgttatgacactgccttctgcccgggcgcggcgaagaaggttaaactaactgtagaagctacgaaactttgatgtgtcggaggtaaagggtagaatgagctcattgaacctgcgtcatcgggctatcgtacatgtaaaacatttacttcgaggtataatataatattttcccatgcacttcagtaaaaatacgcagaagtgggttctacaacatgaaaattgtgtgacacgattcatggcatgctacgaagctcatgaatacatgtaggtacttgaactactgtacgtgttgcgcaaagcccattctctctccgacaatctggatagagggaggtttggaggactcatcagtgcttgcaccgatcaatcgttccatggacgaacgtcgccactgacctatcaccagtttacagtatcgattaactacagtcgttcgagaatttagtgtcaaggtactgtacatgtacagaccgggtagtacccagtttcagtcgtatctaaacctgatgcagcgaatttatcgagacaaccaactcttcattccgacatcgagtgatctgcgtggggctattagtgcacggtatcgagtttttcgaatacgatctgtacattcaggaatggaccaggctttgcgatcaaatagattcaaaacgcgcgcaccactacattgctgaataggtgccggtacaatagttactgtaccacccgatacaaagggacgttcacagaaggcttacttaccttatcgtcgtggcagagtaaatagttgtcaaaatgaacgctctgtgaaggaagatcagagatgacacggtgtcagctaccacaggtactcacaacttgcagctcaatccccttgggaaacacgcagtctcgagcgacttaatgctaaaataaatccgctggaattgatgagcatgccactcgcatggggtcagccagctggatgtgtgcaacagcaagcgcaaatcttgatgaccagctactacgctgacttagatgacttatgtcataccataacgcaattattactacttcgggtgtgttacggtagctatacacgtagatgtacccaatccataacgtaaaacttgatgaccaactataccacatgcaggtgaagtacactcgtatccaccaccgccagcaacagcaacaacataactgcagctaagcacttacgcggtttgtatactgtctttattcagacgtttgattgaatccatggagctcctacattgaagtatgtatatggtttctgcgaataccatgctggattcagtaccagtcctccacgccaactccaaccaccatccagtttgtcggtgcgtgtcagctactgtattagaaagttgccacaagagcgaaatgggctttgcagtattcacgaatttcgtacatgacatggttacggtatctgtattgatgcagcctactctatcgctgtggagaataacttgcagaaatgtaccgaactcgcccgcgctttccaaagtattcgtgcatgtactaatcgataaatgctaagagcatttgctgcgttttgccatcaacgagcttgaaaagaagaaaaataacgaggtaaattatcttcaggcggcagcgtttgtttcaataaacaggatcaatcacgctacgttgaatgcttcctcccttgccagtctattgtacagtagacacgcgcagtgtgatcacactgtatctctggagctacaagttgctcttgagattggacgtgcctgcgagcgctaacaatgggatggtaggacggggcctcgagcgttagttgcgctctgcagtcctcaatttgctccgccgcactaaagcctcaagttcaagcgatcaagcccgaccacgcgtattggttacgtcctgctaattgctgcagccactctcgccgcaagctgcaacggtcttgctgctgagccctcgacctcgacgcagctggcctcgtcggacttgacacaggcgactggtgtaggcaagcggtttctgcgaagctacaaggcggacgagaaggaggaagaagatgaagaggacgggcaagaagacgagagcgaagaagaggagtacagcgaagagagagaggcttcgggctggacgcgaagaagattgatgacgtgcttcacttgtccggttgagcgacaacgaaagtcgacgacgtgatcaacgcggcgaagcttgacgatgcggtctataaaaccacgctcaagagtgcgctggccggtgacgagacaatgcaagcgaaactattcgacatgtgggtcaaggcgcccaagaaggagagacaagctgagattaacaagatcgtcttcagccgtgaaggagtcgacggcaacaaggcgttttttgaagcgtggaacaaattcgagggagctggtcgtgtggggcacgcagtccgctacacgggcccgaagtagtgcggatgcggtatacgtctgccgtccatgttgtcgttttccaatttccgggtaaattactttggcggcaaaacggctgcgaaaggtgtctggctgagtgtcggccaactgtacacgccacgtaaacataatttcaccggtaaagagcgcgtgaagcaatccgatcgaaaggtctccttgttgcttgccggaatacgaaccacaaaaagctacaatggcgagtccgattcaccgaaggaatgtgctgggcgagcatctcgtgtttagatggagcagctctacagtatgttgctggtccaaggcaacactatatttcctgatgtaagagcacttcaaactgtcgttaagcgggttttcccaaacgcttccagtaaaagcgtctaaagatcgcttcactgcgtgtggacactaatttttgctcgcaaacggaggggtcctttgtaaagaaaaaaaaagaggtagccctagactcggagccagagcttccagtacgtgtaaagcaatccctggacatcatcgatcgctgagatcgtatccgggtgaggtaaactgggtcgtagtcgtcggtgcactgtaccgcgactactacagtgacacctccctaaatgaacccctctaactgaccatgtgttccctatctggtttggattcctcgactgcaaacgggattatatggatttcactataggtgttctataactgatcaaaaacctctttattcgcagttcgaagaactgtcgattggggaaggtttttggatgacatcgaacgacattcacgctacattcgtcacttcacccgtgcggatgacatcaaacaacattcacacaacattatacagcaatcggtctgaatggttttgatggatgcctactgtagattgatgttagagcaagtgggcgacgaacaacgtattgtgtattagcggactactacgacgaacaacgtattgtgtactagcaagcatatgaggcatcggtgctaatgatgctaaccttggacacaactggtgccacatcactgcatcgtattattgggtattttgagaggagacgaaggcgaggctgaaaatgggtttctcggcgaggagagatcatggcttttgctactggacacaatacgaccgacaccgtgttcttgaggcgtgaccatcaagtgccggctccgtcaacgacatcatcgccgcggtcacgccagcgctcgacggccgactcacggattccgaccccctcagcggcgaaggtacatgtagcgatcgcccacgcaggcttgctcatgatgtcgtcctgacgaggaggaaccacgtcgggctccgtcgcgctcgcactcgcctacctatcactactcctacaactaccactacctcacttggggcagctcgcgctcccacgacggattatggcgagcgtgtcagggccgaatcagcacacaagggttttgacccgtggcttggcccaactcagctccctcatttcaagcgagagcagctttccattgtcggccaagtcacggggcaacctgctgtgcgtgtctagtgcgagccatgtaagttgcatggattgctggtactagctaactttgttttagcctctgttctatcctattatcatcacagtccatccgcaaccaagcctcttatggggctggcctatccagccccagtctcggaccgacgccgcgaccgaagcttcgcgctgcgacgatcctcgactcggccctccgaggccgagtctttaatgcgaatggactgttcctctttgccccatgatcttgacgagcggagaaactactgtacatgcagcttcaaagcactcaacatagtacttactcattccattagcggtaaaattatcgattcgatctgttatgagtcataacttatacccttctctttcagacacagattttcttctgcacgcatagtttctcaaagagagatattgaaaatcgtgtggtcagctgagtttgccgtgacataaactgtcggcgggctgatattgtgtgaatcgcagggcagccgaaaaataaattgacgctccagtaattgccataaatattattgcataatttatgagcggcggcttagaccgtcattattcatgatgccatattactattccatactcataatttatgatactatctcacgaacggtgcggaagacggcggcgaggagccagagggttcgtttgtccagcgtctcgagaagcgtcgccggctcgaggctcgaaagccccgctacgacctcatctccagcatcccgccgacctcgaacaaggtcgagcggtttctcagcgtggcgcgtaccacgtttgctcaagaacgcaacagtccccagcccgctacgctggaaacaactttgtttctgcgcgagaatgctgacttctgggacgtttcgacagtcgatcgcgtcaattagtgtgagtaaccgtacgtcaaatacccgcaccacattattatttattgctcgaatacattacataatttatgcagatacaattgacaagatccttgcattatttatgagacactatctgcgctaataaataaaaataccttattcggcagccctggatatggtatttttgggattcactgaatccccacactcactggaattaatccggatggattagataaaacattccactaaaacattgcaaaaaactacttaaagtcctatgttgtgcgattcaagataggaagtatattctattttttttcgttcaacaattttttttaatccgaacccaactctacccgccggcaatgcggtgacgtcctaacgaattcattcagcggagactcaaaaagagctgctcctggtggtacgaaaaaaggctaaaggctagctgcactagcttaggcatttatctatgaagacttggatgatttaagcttgtcttgtgtgagactacaatgcgacccgcagagattcaccgaactggtggtgtcgaatgatctactacttgatcttgttcttgtcaaaacaagttcaaagtacattgttaccgatattagttcagatcatcctaatgctacatgcatacagtaccttcagattaatacttgataaatggcaatatcacacttggacgaatcgaagatggcagttttttgttgttgttagatcttcaggcgacccggacaaaatatgtgtgcggctgcaccatgttttatcaaacagtttgaatgctcctatgttgtcgctgtacgccgcgcatcctgtgcgagaggaagcaccgggcggacatcgtcaaagcgaaggacgaacacccggtgtatcctactcctacacgtgatcgaaatctgctagacctcagttttaactcatcaaactagaaacaaattgctggcttcatcgggttatcctgcaagtttggttgagcagttatcctggcagcgctaattattcgaatgcgcgtttttttcttgttttatcgtcacctgtaaatttccgagcacaacactgcaatctaaacaataaaggattctgcctgggcatcagcgcacattacagtagcaggaaggaaggaaattacgttgattacctcgctgttgataaccgttctactaactacaaagaactaaagttaaaactaatccgtggagccctcattcgacgagcaggaggaggtagaatcatcacggtgggtttgtcaaacccaatcgttgaagtaccaattcgttggagtgacgatacatgtatatgaactgacaatgcctttgaaaataagcgatcaaactttgtacacttggttgtaccatggtagattaggcagatgctgcggctgcgaagcaggcgcaggggatgcccgagtacatcgtttccctgtaagggtatccgtacaagctagcttcgaactgcgaaaccccccgggtccaccacccgggtccccaattctctaaatggtcgcaattgttggcgcctcaaccctctaaatggacgccgtagtaatagatccaaactcatatgtttttctcaatcacttgccagcctcctcccacgtatgccattgctaccactactcccgccacaagaaatcgagcgaagagagaaattgtatttgggatgctaagttggaacaaagagtttgcagtaactgcaagcttgtgataaataagctagccacagtattttacaatcagcgcagcgtacatatatattttacgaaaaactaaaatattatgatgtcgagacaactaggggctatgcagtagataccaaacaaaagataaaactgcaggcatggtggcaggatatcgggacaacaaatattcccataatctcactgtattgaaactcacgtacaacctgaggggatgcaataccaatgagaagaaggagtaggaacagacaataccgcgcctaccgttattggttaagttctgtctgtgtgaagacgaaacaaaacaagagtacgaaaatgctggaggggtccaaaaggcgtggacgcagccaatggcgcggactgccgtccggacggcgccgacataaggctccgctcgaactcgaactgtcttcttggtctccaccgccgccaccaggtaaagaaagcccttgtgcacctaacatatgaaaatgtagccattagaaatgtagccatttctttatctgatcaattctttaactgaaacagcgtactgtattagaccgagcaaactgggtgtcatttatagaggtgtcactgtatcaatcaggaatgcataatcgagatatgaatggaagccgccatggggcttggatgagctaatagtgccacttctcctctgcgcatagctgagtacattcttttcgggacagcgctcaggacgaccccacactccatgctgtgtcccacaaagagtttcatgtgacgcgccagccctgacctgttaaatcgtgtgaggagctgttcgcggcgtcgaagttgcagtccgggcatactcagcgtaagtcaaagtcgctgagcgatgctgccccgttcatccaatcgagcgtttaccttgggcaacacgcccaacgcaatggagaccgctaagaccattactgtcgagtcgtggtacgaccgctaaaacctaggttgtccaaaccatacattttccaagtcaaacagctcgacacgatacctggtgtggcgcacaccactcccccttaaaaccctccatcaccctccaatcctgaatcagcaccgccggtagcagtcggccccacattctagcaacaccatgcacggctccggacgcgtcctgctccgcgccgccgcgcgcgccaacagcgccgcgcgtcgctccgtcacgtcgctcagtagcagcgccggcgtcttggccgctcgttcgtccaagtccggcgcttcggcgctgcgtggtgcctgcgtgagctccgtccgcgcgcagcgtctcggcgccgtgtcgtctgtgcaggtgcgcgcgttctcggcctccgcgggtgcgacggacgtgcccgtgccctccatgggcgactccatctctgagggcacggtcgtcgagtggctcaagcagccgggagacgccgtggccgaggacgaggtcgtggtcgtgctcgagacggacaaggtcagcgtggacgtgcgcgcgcccttcgccggcgccatgggccagcagctggccgccatcgacgacaacgtgctggtgggcgcgccgctcttccagatcgtcaagggcgcggcgggcgctgaggtcgccccggccgcctcgacggaggcgccggccgcccctgctgctgctccctctggagaggagaccaccgtgcctgtgccttccatgggcgactccatctcggagggaaccgttgtcgagtggatcaagaaggccggagacttcgcggccgaggacgaggtcgtcgtcgtgctcgagaccgacaaggtgagcgtggacgtgcgcgcccccaaggccggcaccgtcaccagtaccctggccgacgtggaccagaccgtcgagatcggcgtgcccctcttcaaaatggtgttcggcggtgagacccccgctgctgcggcccctgccgccgcgacgcccgctcctgccgctgcggcgtcgactcctgcccctgctgctgctgccccgacgccggccgcggcccccgttgcccagcccgctgtggccggtgccaacccgctgctggccacgcccgagcgtgtgtcccgccgcgagaagatgagccgcatgcgtctgcgcacggccgagcgcctcaaggagtcgcagaacacggcggccagccttacgaccttccaggaggtggacatgaccaagctcatgggtctgcgtaagcagtacaaggacgcgttcgaggccaagcacggcgtcaagctcggcttcatgtcggccttcgtcaaggccagcgcgtcggcgctgctggaggttcccggtgtgaacgccatgatcgacgacgagcaccaggagatcgtctaccgcgactacgtggacatgagcgtggccgtgtcgacccccaagggtctggtgacgcccgtgctcaagaacacagagtccatgagcttcgccgacgtggagaagggactggccgagctagccgcccgcgcgcgcgacggcaagctgacgctcgaggagatgaccggcggcaacttcaccatctcgaacggcggcgtgttcggctcgctgatgggcacacccatcattaacctgccgcagtcgggtatcctcggcatgcacggcacgaagatgcgccccgtggtcgtggacggcgaggtggtcgcgcgccccatgatgtacctggcgctcacgtacgaccaccgcctcatcgacggccgcgagggcgttacgtgcctcaaggccattgccgacaagatcgagaacccggagcgtctgctgctggacatttaagctgcttcgagaagcaattttcccgcaaccgtgccttgcgtgatgaggactcgaagtcatcgaagagtgagagagagagagagctcaggcaaaaccatacagaagagggaatgaatgtgtttcttgcaacaatagcgggtaggctgtctatccgtcgttcaagtcctgatctctgatgccgggcggaagaagtcttccacgatatggggaattgtctggagcccggtgcacttggagtttcgcatctgtagatccgtcttgccggctattgttttctcgatgaaggtgttgcagaacgcgactaacagcttcttgcgcgcgttgacgcccgtgaccagctttaccagcgaccgaggctgtgacagggaatgcacgatgtagctcatgaactcaccgcagtattcgcagctttgatcgtcctcgtgtttccgttgagcgtacatccagacctgatagcggagattcgcgaagtcactgaagcgccgctcgagctggtagtctggatggtccgcgactgcggtggccttgaccgtcggtatacgagacatgctgtgctgaaggaagacttcgactcggtagtacacgacgccgttgcgctccgtcgtgccgttgatctcaatgtggtcgatcttctctaggaacgacagcgtcgccgacagctcggacgaccgcgtcggcagcaattccaccttagaaagctggtgcagcgatcgcaggtcggtggttgacatgccgtctgctcggatttgatgcttacagtgatgtcctcgtggtggtaaatggggaagtgacgaaaccgctccgaagccaacaaatcgctcactaacgagaactgatcggtggtggtgcccggctcgttgttacatgcattgatcggtaagaaatatgtacatgtatgttgccctggtactgtagatgatgctgcaagttgtgcgttagcgttggagtggatttgaaatactttacggtgacgaattgacgcccgtttagataccgtgcgtcctatcacagtattcctcgttgatagcccatcccaacaactgcgagtgaaggttattgccgtcagaatgctgctgtttctctccgatatgaagcagtatgtagacaaagtgtgaactctctctctctctggcagcaacgtacacatcttcataaaagcttcgtggtcgaagaatacaagtcagtatgcaggcactattataccaagcaggacaagcaggacaactcgatgcccggcaaggaccgatgctggcgggttgccaccactttgtcaaatcgcggtcctggctcacgaaaggaagccttgtgtcttcggatgacgaagaccgccggagtgtgatcagtttgcttggacggcgaggtgcagagaccatgactccaccctgcactccacaggattggtccgatgatctcgctgactctgtgagacaaggccaattgccaccgcgggtgcgtggacttccgctaactcgctgctcctgcagctgcctacttgtgaacaaaaacggcaagcccgccacgaggcgacacacgactccccgtcctaccgagtgaattccctccaccaaagcgctctccatctacagtactgccattcttcgtttggccatacagagccaaagccgccggctgtccaccccaacttcgctgtctccacaagaaccatgtccagtcccgcagtcatggtatttcgcgtcctcgccggaatggcaaccatttgcatggtctccagcccttcgctgctcatgtaccggatccacaagcagaagcacgtcggtgtcgcctccgtcttccccctcgccgctctactcgcaaactcacacgtctggtacgtctgccacatcggcaccaatactctgtgaaacacgacttgctaacgccacctcttcctgcctttaggatgatgtacggctacattaagggcatgtggttccctgtcttcgcctgctttctttacggcgaatgctgcgccattgtcttcctctccgtctacacttactactgctcggacaagggctacgtggctcgcaccctggcagttttcgtctcagttctcgcagtcatcactgtctacgccgtcgtgggtggcctcggctacacgggccagtcaacgagcagcgttggcaccatcgtcggcatcctggccgactgcgcgggcatctgcctgtacggcgcgccgatggagaagctcttccaagtgctcaagcacaagtcggccgtcttcatcaacgtgcacatggtcatcgccgggctcgtgaacaactcgatctggctcgtgtacggcgtcctcatcaccaactggttcatcatcttcatcaacctgctgttcgtctcggccaacaccttcacgctgtgtctgtaccgggtgtatgacccgaggacgcacccgctgcaagacggctgggacactcacgacgtcgaccagggcgagatctcggtctgcatcgagctgacgcctcgcatggacacaaagaagtctctcacgagccttcctagcccagagtactcgttcatggcgtcgccgaggctcgagggtctacgacagtaaggtgtgcgaaccaacttctgataacatctgttctgaagtgtccttcaaggacactttcgcgaacttaatcaattgtacataagtatgcaaactttcgctgctcgagctgtgccatattttatggtacaacataccaaatcgaaccagccagcgctagcatacgccctcaggccccgacaactcacttcgcttgtgtcgatgtacgctgagctagatagacatacgctgaactagacgtaccaagcaaacaccgtttgtatcagctggctgacacgttttacgaagaccaacaagctcgacgccgcttcatttgacacccaccatggtagcatgaataggaagcgtggcacgccaaattagatccattcaccactacatgaactaacgcacattgtcactcacattgtcgtttttgtcggtgcattcctctgtgcgccgacttgggtccgcttgaagtgctttgggcacgacgcctgcgattggtcgccggatcagccaatcgccgtgcaggtgagaccgtcgggcggttttgcgcactgctccatgtggttggccacgatcaggaggtgcgtcacaactgcaccaccagctcgcttcctcggatcctcccgcttcgcctccgccgccatgtcctccgccgccaccgagatcaagtgggtcggcgctcgccccgacgacctgcaccaccacctgcgcgacggcgacgccgcgctggcccgcaccgtgtcccacgtgacgtcccagttcgcgcgctgcatcgtcatgcccaacctcgtgccgcccgtgaccaccacggagcaggcgctggcctaccgcgagcgcatcctggcccacgtgccggaggacaagcgcgacccgagcggccccaagggcttcgagcccctcatgacgctctacatgacggacggcaccaccgccgacgagatccgccgcgccgccgccaccaacaagatcttcgccgtcaagctctaccctggtacgtcagtcaatgcatgggctatagaggcctctcagacttactgactgttgtccttgacgctgcagctggagccacgaccaactcggactcgggcgtgaccaagatcgacaacatctacccggccctcgaggccatgagcgaggtcggcatgccgctgctggtgcacggcgaagtgaccgacccgtccgtggacctgttcgaccgcgaggccaccttcgtggaggaggtgatcaagcccctcgtggccaagttcccgcagctcaaggtggtcatggagcacatcacgaccaaggaggcggccgagttcgtcaccaacgcgccggccaacgttgctgcgacgatcacgccgcagcacctgctgtacaaccgcaacgccattttccagggcggcctgcgtccgcacaagtactgcctcccggtgctcaagcgcgagacccaccgccaggctctgctgcaggccgtcgccagcggcagcaagaagttcttcctcggaacggacagcgcgccccacgttgcctccaagaaggagtcgggctgcggctgcgccggcatctactcggcccacgctgcactcgagctgtacgcggaggccttcgagtccatcggcaagctggacctgctccgcgcattcgcgtgcgagaacggcgcggacttctacggcctcaagcgcaacaccgtgggcgagaccgtcttgaagcaggaggagtggacggtgccgggcagctacccgttcgacaacggcgtcgtcgtccccctcaaggccggcgagaccatccgctggaagctgcagcagtaagcgcgttgccactagctgcagtgatttttgtcttcgctctgccgtctaggaggcagactgtgtagtggttgtctgttcacgtggtggcgaagagaagtccgagctagcgcgtttctctctttttttcatctcaaacaccgacttcaaaatccgatacgttggttcatgcgttgcagcagtcgtagaactgggcggagaagcgctgctgcttgccgccacgtctcctttcttcttcttgcccgtggtcatcacactcccccgcacgatcaacgcagtcaggaagctcaagaaatcggagaactctcggaaaacttggctaacgcggtagcacgacttgccgacgttgttgtcgggctgcaaagggtcttcaatgatgagcaacccgtcacgagacagaggcggcaccagcatcaggggcgaattggagcgggaacgccccatagtcggagatgttgcagaaggagataaagcgagcggcggcggcgagacggatcttgcaatcggagatgtttccactgacaacaccgttggttcgccccacgacacaactgaaacctggtcgaggttctgccggaagtcgttcccgtaaaactgcaagaagtccatgagcagtttgcccagcaggtacggcttggtctcgtgctcgccacctccctccgaccccgtcacaaacgaagggagtactgcacgcttcgccttccttctgtgctgtttctctgcatcttcattcttttttggctgctgcttggccgagcactgcttgataatttccttggcgataagctctcctttcaggcgctgagcttcgtatcgcgggttccagcgagagttacacggcggggcagctggcttggattcgttcaggtcatcatcatccgcgaggtcgtgggcaagcctttgtccgtctaccatcgaaatgagtgctccttgttctcgcagcacgtacacaaccattagcagaagaccatacgacgataaacctccaacgtacgggtcattgagcccgcgctccaccagaaaatgcttcaacacaagtgttagctcccgcaagccgtaaaatgcgtccacgagaccttgtaccagcgtaacacttgccacaccgttgtggtgaatgccatgaggctcatcaaatgtgatatcgaacggaatccgcagctcaactccaccttcgcgcgcagcgttctcactctgagtctcctcgcagtcaattgtcaccaaaaccaccactttcagcagtggaatggacgcgcgcgtgattgcgctcacatctacaaatgctggcaacttgtgtagatgctcagcaagagccgccacacactgctggctagtaaaattaaactcccccgtagcgccaaaaacaaccagatcgacatcgcttgattcgccgtgcagcctcgtcgcaaacgacccgtatccttctacctgtacgcagtgattatagacgcgttgaatttcttcggtcaccatcgcaatcgctttttgtatccagggacgcttttcccgtgcctcccgtcttcgatgctggtaataatccacaatctcatcatgcagcacgacctgcatcatggccgtctgctcttcgtaaagtctctgcaaatttccaaacgacagtccacccccgttctcgcctccttctgctcgctcctcatccatccgccgctcgcgctccttttccgtcgcttggatgacatttcttctccactccagccgctcctcccactccttctctctagagatcccgttcactggacagttcgctagatgctccgctaggttttctcttgagcagatctctttgcacccgagcaccgcgtttggacacaccacgtcgtacgagtagaagtccgtagtcgtgtcctccaccacctgatccagcgtgtcgggcacctgccgatacacgcagcgctccaggtgcgactctaggtccttgagcatgcagctgaacgtgcagccgaaccaactgttgggacacacgacctcgtagtcctcggagaagcgcgagatggtcgactggaaccactgcgtgttcttcatattgtccaggaacatctcgcgcatcatggcctcttgctccttctcgatggttgcgatagcccactgccgccggcgctgcacctcttcctcctcctcgcactgcagctgcttgagcacgttgagtctccgcgcgcgctccttctcggccgcttcaatgacccactgggtccaataggcgcgctcggccgcctgctgctcctgctctcctctgatcacggctcgctcctcggcgctgagctctggatgcctgaagagtctggacctggtgggtctagatgactctgtagtgctagatctagactctgcatctctagaacctgcaggactgggcgtgctgaagggactgaagccgatctgaggctctggagtcaacgcggaggacgatgtgaagctcttggtgggcgtgaagggcgcggcggacgggcacaggcctggcgtgtcatccgacagcgttgacacattgcgttcgggcgtctgcggctcgttcgagacgcggaaactcgccttcttcttgggtcggcgcttgcggggccccgagtggttcttcttgggcttggtcggctctccgacgagcgctgcggcgtccggcatgagcggtccgttccaccgtgcttgtcgtctatgatgtgctccacatcaatattgtgtttgcaacattacatttttttgttttgttgtctttttagaatctaggatgtccagtgtcacctcaacgagcaacttttatctgttcgttccaaattgccgagccattttccttgggctcaatcgcggatcggcgccgaccgatggattgcggcaagatgaaggtggacatcgatgggctggaggtgctctttccgtacgtgccctgaccgtgcccgtttgcgtacttattattgctctgcaagcgaacttaccgggcaataggtcaataatgtactgagtcagtatcagtagtactgattcggctcactcattccccatgtccttgatggaccgggtccattggaccccataccctctgcgattgtatacacaataattgaagctgcaaaagtttaagggagatgtctgtacatgtaatggcttataaaacagggacgtatcaacgtattgcctacggtaggtacctagaaaaaatatgctcaccgtacatgtgcatgcgtgataaatgacatttctgtggagttattaccgatgtccggatatccgcgaatgcctgcgattggcttggacaaatggatgcggtgtactcgtatgactactagtactactcgtactactactgtagtaatcaaactactagatactactagtctactatagtagtagtcatcatagcgactggtacataatatgcttacgacaagttttcagactccaccaccattgaacctgcaggtacagctatttttttctcgcattctccggttaccgtacctcacagaaagatggttaacagatagaatgccaaaacaagattttcgagcatttggttcgtttcattgctttttcttaaagcgttttcaaatcgctggtttacatacaatttgaagcgtttgagcttcgcctaccgaatattgagtaaatatgcagacgacatgtttaagctggacgatggagtcgacaatttcctcacccagccgaccgtgcaggcctgggtgtcctcagtgaagaagatgaacatgcagaacccagcgagcaaagtgtcgatactggaaacgtagtcgaagaagttggatgatgccactgtcgcaaagatgatcgagcacgcagcgaaatatggcagtacggagccattggcgaggtcattaaagaaggagctacttctgaagtggacctcagctaacgagtccccggctaaggcgctcaaggtgctaaagctcgacaaggaggcaactggtcttgcttcgaaccctgctttggctatgctggcggactacgtgaatgtgtggaacctcaagaagcccaaccagaaaacgaatctgatgaacaccatcatgacgtcgtcaaactgcgatgacgctatcgtggctcgggccctcgaagcggcgaaacaggccaaggcctcggaagattgggcattgcaattgcaggggttccagttcgaccgctgggtggagctcgggtacagcccaaagaagatgcccggggcggtattcggcaccaagcccaccgcagaggaggcatcaattgtgaaacaatacgccgcgtactacaaaagccagaagaccgttttcgacgcgattaaaagtttatcgtagatgaaaagggtgcacctagtgagcacgtagttatcacttcgcccagccatctcgactttttaaagtcgagattaaaaacaacaactacaaaaatacagattctccgatggcatcgatagccgtgttcgtacgctccacattaatgtagtacacatcaatgttgtgtttgcaacatcaacctcacttcggagcccttttagaatctagaacgaacaaatcgtccctactttacctcctaaatccaatctgttcgttccaaactgccgagccatttgtccttgggctcaatcgccggcaagatgaaggtggacatcgatgggctggaggtgctcttcccgtacgagcgcatgtactcggagcagctgcagtacatgcgcgagctgaagcgcgcgctggacgcgcagggccactgcatgctggagatgcccacgggcacgggcaagacggtgtcgctgctggcgctcgtgctggcctacaagcacgcgcacccgacggccggcaagctcgtgtactgcacgcgcactgtgcccgagatggccaagtgcgtggaggagatcaagaagctcgcgcagtaccgcaccgcgcactacggcgccgacaaggcgcagctcacggccgtgtgcctcagctccaggcgcaacatgtgcgtgcacccgcgcgtcatggcacacgccgacggcgaggacgtggacggccagtgccgcaagatgacggcgtcctgggtgcgcgcgcgcgcggccaaggcgcgtgaggccgcggccagcggagacgtcccaatggacggaggggaacaggtgcgggaggtcgagacctgctcgttctacgagaactacgacgcgcgcaagagcgacgacaccgttctaccgcccgggatctactcggtggacgacctcaaagagatcggcgccaagaaggggtggtgcccctacttcctgacgagatacgtcgtcacctttgcggacgtggtggtctacaactaccagtacatgctggaccccaaggtgagtcagctggtgtccaggagcttcgagaaggagagcatcgtggtcttcgacgaggcacacaatatcgacaacgtgtgcatcgaagcgctgagtgtggacctggaccgacgctcgctggacagggcgtccaggaacttgaccacgctgtccagtcaggtgaacaagttgaagcaggcggacaaggcgcggctggatgcagagtatcgcaggcttgtggatgggctgaggtcgagtaatgccgtcgtggcgcccagctactcggacccggccacgaaccgcaacattgacacaagcaacgacatcatgatcgctaacccagtgctgcccgatgatgtcctggatgaagctatccccggtaacattcgacgcgcagagcacttcgtggcgttcatgcgccgacttattgagtacctgcggcagcggattcgagtgcggcaggtggagtcggagacgccgcaggcgttcttgcaccacctacatcaggctatcaatatggagatcaagcccatgaagttttgctacacgcgactcaactcgctgctgcgcacgctggaagtgacgaacttggaggaatacaacgcgctgactgatgtggcggactttgcgacgctggtggccacctacgcagaaggcttcatgctgattattgagccgttcgacagcgcgtctggcgtgcacgaccctgtgctgcagctttcctgcttggacgcgtcgctggcgatccgccccgtgttcgaacgcttctccagcgtcattattacgtccggcacgctgtctcccattgacttatacccgcggctgctgaacttcaaccccgtgatccgcgagtcgctgcccatgtccgtgtatcgctcgagtatttgtccgctggtgatcacgcgcggaagtgaccagatgcctgtgagcaccaagttcgatctccgtgacgacatgtcggttgtgcgcaactacggcactttgttactcgagatggcatcttgcacgccggacggcatggtgtgcttcttcccgtcgtatctgtacatggagaagatcatcggccagtgggactcgcttggcgtgctaaagcgtgtgctaagcagcaaactacttttcatcgagaccaaggacatcgtggagacgaccctcgcgctggataactacaagaaggcctgtgactgtggtcgaggcgccatcttcttctccgtcgcgcgtggtaaggtggcagaaggaatcgatttcgaccgtcactatggacgcgcagtgattctattcggcatcccgttccagtacacgctgtccaacacgttgcgcgcgcgacttgagtacctgcgctacacgcaccagatccgtgagggcgacttcctcacattcgacgcgctacgtcaagccgctcagtgcgccggtcgcgttcttcgtagcaagactgactacggtctcgtcatcttcgctgactcgcgctacaatcgcgctgacaagcgaaccaagctgcctccgtggatcacgcagttcctcgtggactcgcacctgaacctgtcggtggatatggccgtgttcatggccaagaagtacctgtcgctgatggcgcagcctgtggacgagtccaccaacgtcaactccatcctgctagatgccgagggcgtcgccaagtggctcggcaaacaccccaaggaggacgaacccatgcagtaaagaatgaatagcagatgcaccaccgaaggactagcacagcactaagatccgaccttgaggctaagattaacaattgatcaacaggacaaagtgcagcaataacaacaggcgtatcgtgtgtgtgtgtgggtataaaactctccatttcggattaaccggccgccgatcacaaggcaaagacgacctgcatccctacagcaagcttaagtgtgcgaatcaacgcggcgcttacttgcggggctcgtccagcacgatgccctcgaacttggcctggaaccagttgatggcgtcgtccttggtcaggcggtgggggtggcccacacggccctgctggatcttacggcgggccacacgggcacccgggcgcttgagcaccacgaagaagtccatgccgtaaatgcccgtggacgggtcgtacttgatgcccaggtcgatgtgctcctggataccgaagccgaagttgcccgtctcggagaagttcttcttcagcagctcgtattccttgaccttgaggccgcggtccaggatctcctgggcgagctcgccacggatggtcacgtggcacgagatcttttcgttacgacggatgccgaacgtgcggaccgtgtagcgggctgtcaaaaatcaacaaacaaagcgtccaaaagtcagctcaccctgtcctgaacctgcagcacttactcgacttgaacgcgcactcccacttcgagaccccacaacaacgaagaggtctctcctaaaatccagcactacgttttcgacattgtcaaaaacagcaagtgcgttcgcagcgagcacgcgcctctgccatccgtttagacggtccaaagaggactagacaccaacctccgagatcattgatgtgtgcgtgtcgctggcggttctgagtgaaggcagcaaagccgcttcgtagtactcatgacgagcgcgatcggggatgaaccagggccccctgccaagaggaccccgacacccggaaaggccgtaggattttagacgcgcccacttggacaagcgggcggcccgggtaagtagcccgttaaggcggttctttgctttttagcaggtaaaaagcttacccttggagtacacgggcttctggccagtcagctgctcgagcacacgagcggcacgggtcagcttgtcgccggactcgccgacgcagcagttgatcaccagcttgtcgacgtggatctcacgcatcgcattgttgctcttgtcgccggcctgcacgttttcgacatcgacatcggttaatcatgcgttttcgacagcaacaggcgcacagttttcgacgcaccatcttagcttgttgtttggagcttttggagaagtactggcggccagcggacaatcggcggcggtgtttgggctggagcccaaggcccagccacaccaaccaatggcacggatcgacttcgcagtatggatttcactatgaagcgcaccttgacggagataatttccatgcgacggatggcccgtgtatcggctggtgtggcaggcctgtccgactaagtacggcaactattgatagttgaagttgtcgtcttgtccgtcactcgtgagcgtccacgtccaagtggcttaggttccattatcgatcgcccatggaaccacgaggcccggcgctctcgtcgctactgtcgacccgagggccgatgctcgcgagtccgcgcgtggctcctctggccatctccccgacttccccgctggctgccgtctcgctggacgcaacgtttagaacctgcagcaacatctccagtatgaggacggctgcagcctccagccccacgctagcggatctcctcgtccgaccggaggagaagaagctgcagcacaccagcagccacttgcgcctgcagctgcagtggtccagcgcctacaagatgcagctgctggtcgtgcgcaacgccgtcgtctgctgcgtctgcgcggccgtcaccaacggcgccttctgcgtgggcaacgtcttcgtcttcaagtggaccagtcgctccacgagttcgtcatgaccacgctgctctggatggggctctcgtacgctgtggtgctcaccgtcgcccacgtgcctttgctcatgacccagcgtttcctcgagttccccaacacgcacccagggttctggttctgcgtcaagaagctcctgagcaagtcgtgggtctctctagctgcgacactgacaggtatgggcgcggtgggtctagtagtgcagaacacgtcgctcatgacggagcacttccggtacagagcgcacttctacctcgctgtcgcgtgcaacctcacgttcacagcggggctgacgctggcggtgaggaggacgtactacgaggagacgcaccaagggcgcaatcgtcgctgtgcattgaataacctgtccgagcctcgctctcccgtgacttcgacaactcgaaatcctcatcagaaaccaaatccaaaacctcatcggcctccacggtaccaaacgccgagtttctggcgtgaaactctcaaccaactaccgaacgccgtcctgatccttctggctggcggctacgtccacgcagtgctcacgttgtggcagacgattcaagaccgattttccgtgatggggttcacagtctttggtgtcgtcctcaaactcgcactgcaagaagcagcacgccactacgtcctcaagaagcgcatccgtagcgtccgcaccatgtgcgtcctcgtcggcgtaccaaccgttctcatcgacacgcagtcgcggatcgttctactcgcactaccaactcgtctctcatgaccggaacttttgggatggccatggctgaggtcatgctccgcgcgaccaaagctgcgctcgtagtgtgggctactcgccgtcgctcccgagttttagaggggaaactgcaacaaattacgctggagcgctcacgacggaatactggggcagcgcctggacgagtgtcttccttcttgccctcgcccgagtccgtgaagctggagtacgaactctggaagaagcaaatgctgtcgtaccacacggccgaatacgccgagtacattgcgatcggctgctcccagtcgatcgtgttctggtggttcggccacccgctgtacccgacgctgcagcgagcggtcatgtcggagatcgacgtggcgaggtggcgattcaaccaggtggtcatgttgggcttccagtcgttcgtggaggtgttcgtggactggggatggagatggcggcgggcatcgagctcgaccggatcgaaaatctcagtacattcctctgttcatgacggtggcagtcgtcaacatcaacatctcgagcgcagtctatctcggctgggcaacgattttgtctcgcttgggcgctgatcggggggggggggctatttttcgagctgactgacggacgtggagcggtttattcacgacgttcaagcctttttacaccatcctggacccacctggagcctcgctctcaggtgtgcaatggcgtcacacgcgccgattctggcgagtccacgcgtggcccctctcgcttcctcgtcacttacctccgcgtcgctcaaccagacgttccgaagcgctgcagctacggacccgaccatctcggacctcgtcagacgacttgaggacaaacaactccagtcaactccgacttcacttgcagtgggggccagcctccaagatgcagattctggtcgttcgcaactctctcgcatgtgttgtcgctgcagttttcgtcaacgggtgcttctacgcggggaacattttctctttcaaaccgtccaccgagcagtctcctcgggaattcctcatggcgatgctggtctggacgatgctgtcgtacgctgtcatcctggtagtcgcccacctcccgactctgatgagccagcgcttcctcaagtatcctgactacaaaccaagtgtttggttctgcatgagaaaactcctgaaaatgtcgactccttacttcgtcgcctcaatgggggaatggtttgcgtcgatttgctagtgcagcatacgccactcatgacggagctcttcacctacagactacacttttacctcgctgacttgagcaacctaacttttacagcgggtattacgcttgcggcgaggaggatatactacacagagacgcatcaaggacgcaatcgccgcctcgcagtaaagaacgtttccaaacgagctgcttcgagatcattaacgctgcgagctccgtatccagcagctccgagttaccactctccgagcttctggcgcgaatatctcgtgaatttgccctatgtcatcatagctctgtccggagggtatgtgcacttcgtgtcttcctacaaaattctgcaccgaggcactatggtgatcatcgcgttcacggcagcggggattgttatcaagttgatgctgcaagagcttgtcaggtgctgcaagagcttgtcaggttctacattatcaagaaaggggttcgcagcatccgcaccacagtgctgattgatacccaagcacggatcgttttactcggcacacagaccagccccttcctggtaagcgggacgcttgccatggctgtagctgaaatatgtctgcgatctgccaaagctgcgctgattgctcggctcattcaccgccgagcgagaattcttgaagaaaacctacaaccgatatctactgacaacgtggatacgaaggaaggaggaccgtcggtattttcgctcaactagcagtttgaactgtggcgtcgacaagttctgtcctaccacacggcggagatcaccgccgacacgtacgcggagtacattgccatcgggtgttcgcagtcgctcatcttttcgttcgtttccggcgctccagctgagcacaggcagtggaggcgaaggcgcgatgtccgagctcagtatggcaaggtggcggattcagcaggtagcgatgctggcgttccagtttgtggtggaaatcctcgtcgactatgtgtgcgttgtgatggagatcgccgctggtgtcgacttcgaccgcattagggaccacagctcgtttctcggggtgctcttcatggcgatggctgtcatcaacatcagcatttccagtgccgtctacctgtgcatcccatagaagacaattgttattgctcgttgacagtcctcaaaccgcagtgacgttggtgtattagaaacggatgaccaacttcaccgcgcccagaccgcccgctatttcgagtttaacgcgtcgaaatttgagctgaataatcttggatgttggcggaaaactgcgttggacaagcgcccaaagcccgaagaatggtatcccgtgcttcgattctagcgagtactcgagtggttccgctgtctgtggcctcgttcaccttctccacagtctccccaggcgcaagtatccgagatgcagtggccatccgagacgccgtcgtctccaagttctacatcgacctccttccacgcccagaacacaagcgccttcgccactacagcagccagctacaactcaatctccaatggaaattggcagccaggatccagctccaagtgttccgcaactccatcgcctgcgtcgtcactgcagtgtgcgtgaacggctgctactacgcagggaacatcttctccctcaagccttccgccgagcaatcgcggccggaattcctcatggcgttactggtgtggacagcgctgatccacagcgccaatatgacggtcgcctacatccctatgctggccagccagcgcttcctcgagtccccgaacagcaaaccagtctgtggttctgcgctcgcaagctcatgatcaacacgagacagtacttcattatgacgctgggggcaacgatcggcgtggggcttctcgtgcagaacacgtcgctgatgtacaagcacttaactacaaactgcacttctacctcacgatactgtgcacgcaggcgttcaccactggcgtttcactcgctgggaacagaatctactacgaagaaacgtgccaagggagagaccaacgcagcgccatgagcgaagtgtccgtgcgaaggctgtctaccaacccgcagtatcgacgtcgacctcccttacgaaaaccccgaaactacggcgtatcgagcttctggcgagagtatgttatgaagtccccgacggttctgcgtatcgcgctggctgggagatttgtacacattgtggcgtggtacagagtgctggatcgaggcacgggggtcgtcatgggcttcacgatgcttggtatcgtcgtcaagctcggacttcaagaggctgcgaggcactacatcctctcaacgcggattcgcagtatccacaccatgtgcatcctcgttggcgtccccactgtgctcatcgatacccagtcacgaatagtgctgctgggcactcaaaccaatacgatcctcgtctccggaaccttcgcgatggtggcggcggagatttgcctgcgagttgggaaagcagcgtacgtggcgtggaagatccgacgtcgtgctgctgcgttagagatcacactatcgagtcttagcggaaactccgggcgtagagagtcctcgcagttgtcgctgaagatggagtttgagttgtggaggaggcaggtgctgtcctaccacaccgcagaggtgacggccgaaatgtacgccgagtacatcgccatcgcgtgctcccagtcgattattttctggttcgcagggcatccgttttacccggcgctgcaactggaagcagggagcgggttgtcggagattgacgtcgcgaggtggcggttcaaccaggtggccatgctggggttccagttcgtcgtggagatcttcgtggactacttgtgcgtggtcttggagatggcggcaggcatcgacttcgaccgcattggcagtctcagtacgttcttgggcatgctgttcatgacgatggctgctatcaacatcaacatttcaagtgtagtgtatctgagctgacgctatgaaacatgcatgcaaacgaacttcgcgtgaaattacatgcttttcagtgttaaataaattcaaatagtccattcatcgcggcacagtcgaacagtcgagcctaactacctccatggcaattaacatgaagtatcagcgatccatacagtactttagttcatcaactctgcacgtttcgtctataagcagcacaaggttatcaacgctattttaactgttgcgttcatgtgcgaagtaggagaaaaaatcgacatctctccgcattgtcagcctgatctccttctattcacatgctaccgagtcttcgcatcgcaccccgagtcgcgtctttccccgtcatctcagtgactcagttccgagaagccgtcacccgggtgggggatgaagcgtattcaagccagcagctccttcaggtgcacggagttagcgccgcgaagactcagcttctagtggttcgcaacgcgctggcctgcgtggtgtgtgcggtggccaccaacggctgcttctactctgggaacgttttctcacgcaaatcttctaccaagcaaacgcgccccgaatttctgatggcgacgctggtctggagcgcgatttcatccagttttattatgttggttgcccacttgccttcattaatgagccagcagttcctcaagttccccgacagtcgccctggtgtctagttttgcgcgaaaaaactcatgaaaggctcaagtccgtatcgcgatcgaagccgcacgctgaaaatgcagatcgtgtcaagctcgtcacctcaactaatggcccgagtgaagaaattccggtcaccgagtttctggcgcgagtaccgcaagaaactaccgggcgcggtacttgtggctttggctggggcgtacgtccacgccgtgtcttcgttcaggatattggacaggggcgaaatggccatcgctgtgttcgccttgtctgggatcatctttaagctctccatccaagaaacagccaagcggtacatcgtcaaaaagggcgttcgtagtatccacaccatgtgcgtgctcgtgggcgtgcccactgtgctgatcaacactcaaacgcggatcgttctactgggcactcagacaaacgcgctgttggtaactggaagggcgctggctgaagtctgtctgcgcgctgggaaggcggtttatattgtgtggactatccgtcgccgcgctaaagccaacggacagcactacgagcaaatacctggcacctccaagattcctaaaagcaaaagtgtattaccctcccccactctaccaattgcgaggctggagttcgaaatatggcgacgacaggttttatcctaccacacggccgagttgacggcggatatgtacgccgagtacatcgcgatcgggtgctcgcagtccattatgttttggtacgtcaaccacccgttctacccggcactgagactcaaagcagggggaaatttgtccgaagtgggggtggcgaggtggcgaatcatgaagggagcactcgttgatcctgcacgggttgctccttgtagtggtgcctcgcacctggtgtattgcagaatgagttaggttggatgatgctaggatgtctgtgctaggctaatatgcatcggtagtttcgtgttgtgtagctggaggggtcgttgtggtcgtcgcaggccgttatcgtcgccactgcactcatcgcaggtggcgccagctcttgcgatctccaacagtcctcctcgaccaagatgatccgagtctacagcttctcgttgtgcgggttgataagcttgatcatggctaggttgcgcccgtgtagagttgcgctgaggggcttcgtgaaaatgtcggccttcatctcagtcgtagggcaataggtcacgctgactggcgtcgcgtatgaagtgaaattttatgttgatgtgcttcatgcgtgcagtcgtcacgtcgttctccatgttcttgatcgcgctctggttgtcgatgtacaagtcgatattatcatctttgccgtgcagctcaagttcattcaggagctgcttgacccacaagcagtcctgcactgccgtcgccccagcgatgtactcagcctcggctgtagagagggcgaccgtagattgtttcttactgtaccacgaaatgagcatggcgttgatggtgagcagtcctcctgaagtcgactttgcgtccttgcccccggcccaatctgcatcgctgaagatggctgcctcaatagtgtgtcggggtgcctgcggccggggaaagtgcaacctcaactcgtgcgagccgcgcaagtagcgcaggatacgtttgactgcagtcgaatgagtcgacgtaggcgttgaaacgcgccaggaagttcacaggcatcgtgatgtctggtcgagtgcagttgctaatccatagtagtgacccaatggtctccctcatgatgctagtgtcgtagaagggctcgctgtcctcgatgctagtgtcgtagaagggctcgctgtcctctccgttcaggtcccgagttgactccatcggcgtagtcacggggcggctattctccatgccgcacttcaccagcaaaccgtcaatattggctgtctggtggaggtagatgccgcagtcgctctgctcaatgttaattcccaagcacttcttggctggacccatgtccttgatctgaaattggtcggcgagcttctgcatcgtccagtcggaatcgccctcacgctggctgacgaccaccacatcatcgacgtagaggcccagtacagttagcttgccttcatgccaacgaaaatacaagcacgctcctcctgaagccaagtcccagtaagtagcggtgtatagtgtcgttccacaacttgccgctctgtttaaggccgtagagactctttcgcagcagtaggcatttgcccttgggtaattggagtccgacagggccgcgcatgtagatgggtcgatcgaggtctgctcgcaggtatgcgttaggaacatctccttgtcgaatgacggcatgccactgagatgcgagggccacaatgaaccgcaggctcgcgatcttgagcacgggcgcaaaggtctctgcgaagtcaatgtcaaacttttgagtgaagccgcgcgctaccagccgtgctttgaaccgttccaattcgcctttgttgtcaaacttgagcctgaacacccattttgcacttatcagatttccatcagtaggaatgtccacaatttcccaggtagcgttcttcgatattgctcgaagctcttcttcgattgcctgccaccactcctgccaatacgggctgttcattgcctcctccacagttactggctccttgatcccgtcacgctctagtagtaccgcaaaggcagtaccctccttgagtacgatagtgagcaggacagatgccggagtggcgaactcttcgagaaaagattggggcagccgaaagtcatcgcgtggtagtgctcgtgtacctcgattcaggccaaagatgcgctggatggcacgcgacgtaagttgatgctgctctgcagggctaccagccgtgcttcctcaccattagcgtcatgtggggtgttggtttcgtactgttgatcgccagcatcctcctcctcgccgctattgtctgcgtcgacagcgtccatgtatcgtcccacggctcgcgagtccagacggtcaacgttccggatgtgtgttgtagaaataacacgtttggttcgcgggatgagaacacggtacgctttcttcttgaagtcgatgccaataacaactcctctttcagcgcgctttttcgctgatcgcttcgttgcatgagcgatgtggctcgtacacttcgagccgaatttgaggatgtgcgttcgctcgagtcggcagatagttgcgaatgtagctcgcatacagaacagcatcgccccaaaatcgctgtggcaatgccgaggcccagagcatcgctcgggcggaatccatgacagtccggtgaaaacgctctgcttttccgtttgatgatgacatgcccgcctccgtttcttggtggagaataccccggttgcggaggaagcggccgagtctggtgctgccaaattcaccaccaccgtctgagcgaatcatcttcaccttggtgtcgtattgtcgctcaaactcgctaacaaagtcctccaaatgcccttccgcgtcgctctttttgcggagcaagtaaacgcgattgtagttcgtagcgtggtctacaatggtcaaaatgtgtttgtgaccgagccgatccggggtcatgtccgtcttcaggtcaacgcacaaggtagcgcccggttcgtccgttggggcagatgtagaagtatcctgcttgttcttcgcgcgtcgagcttgtttcgcttcagcgcagttcgtgcagaaatccaccttccgattagaggcaaccatgccttcaacgaggtttttgtcagtcatgcgtaccagatcctggtagttcacgtgccccaggcgttcatgccactgctgaagcgtagaggtcgtcattgctgcgaaggaggccgcgacttgctcgattccaacagaccaaagcccagtcgaggctgaattacccacttcggcaacaatcttgcccgtcttgttcgtaattgtacactgctcctcaccaaaggtgcaggtgtagcctcgggcggtgagttgagccactgaaatcaggttgcggtcaataccttttgcgaagtacacgttttctagcaggacagtacgaggcactccttctgccatcgtcgtgatgacagtctttcccttctcagtagcggcgacaacatctccattcgccactcgcaccgacaggaatgctggctctatcgcgaaaagttggtcacggtcgatgcagaggtggtgagttgctcccgaatccactgtccaaacatttcctctcgtggcagaagcgccgcgctcggcatcgtcggcagcgacccagacatagccttcatcatcagaatctctggatgtgtcgtcatcagcagcagcgcctacgttcgcacttcctctggtggctagttgttttgcctgttccacgagtggacacgtgaaaatcttgtgaccaggcttcccgcacacatggcaatgtatttcaccacgatgaccagcggcggcaaaggcttggccgttattttgctgctgcggaagtcgatccgagttgtcgttgttgtttcgctggttacgccaatgctgatcatcattgtggcgatttccgctgcggtggccatgtgaattcgggttccggcggtcagcatgacggtttttgcgttcatctcgcttcgcaccacatctgcgcccgtcacctttcagcttgtatagcagtcgcttcatgcgatcagtttccgcaacgtaatcgcttgcgtcgtcgggcactgaagacaacagcgtgggcgctaactcggggcatgcattgtttccgaacacctccatgaccatcttggtctgatcaccttccatgaggtctcgatgaagttcaagtattccaggtagtcatgccacgtatcgccttcacggttgttatactgcatcttcgtgctgagttcgagttggcttagttaacagccaaactctgcacgcatcgcgcgcttcacatctgagtacggcatgctgtcaccatatgacggcgctgccactctgagttcttcttgtgatagtacctagacgctttccactcgaggaagttgacaatcaccgatgccttgatgtcgtcggtccaggtggatccgttcacgagctcctccgtccttattgcatgctcgaactcgtggatgaaattctcgaagccagctcctaacccagggtaaacctcgtttcccttgaagttcgagcagcgtacgtccttgattttaggcttcttcggtgatggaggtgcggtttccatgctagtatccgacatggagggggcacggggcgctcgcgccgcgagctgcttcttcagttctgccagctcggactgcagtcgaaggatgagctggagctggtcgtgctgctccattgtctcttggtccgaagggtcgaagtgcaggtcgtctggcagtcctaggcgagtattccttccgtcttggtggtctatgtcagcctcgttagcgcctcgtgcctctgagcatttttcaaggtcttcgtggtcgcaccgcgagtcttcgaagtcttcactggtcgctgcagaaggcgagccagttgggctcataacctgaagggagcactcgttgatcctgcacgggttgctccttgtagtggtgcctcgcacctggtgtattgcagaatgagttaggttggatgatgctaggatgtctgtgctaggctaatatgcatcggtagtttcgtgttgtgtagctggaggggtcgttgtggtcgtcgcaggccgttatcgtcgccactgcactcatcgcaggtggcgccagctcttgcgatctccaacaaatcaatcagatcgcaatcttggcgtttcaattcgttgtggtcgtgattgtggactacatttgtgtcgtcatggagatggccatcggaatcgagttcaaccgcatcaaaggtctcagcgcgtttcgtggcgagctgttcatggccatggcggttctaaccatcaacatctcggctaccgtctacctgtcctgatactgtaatacatatacatgaggcaggagccacaatcgaaaactccaacaaggctgtgctcagcccggatgtggtcaccagtatgcaaaggaaagtaaaatgaattttgatgttagctcctccaactctaaactagtgcttgttcatgttcctggcttttgcctacgatttcgtacagcttctcgaatccggcttctagaactctaagcaccagagcgagctttgcttcggatcgtacaacatgcactgcggcagacacgagaccggccagagctggccacaacatgaatgtcaagatagagttgttcaatgattttgaaccctagcgagagatgacttcgcgtagactggaaggcggcaaaaacaacacgatatcaagcgttacgatctgcgttgagtagcaggcgtccgttgagcttgaaaatgcgtgtttatcttcgtagctgcttgccaaatatggtgttcttcgccgagtgccttcaacgttttgagggaactccatggaaatactgtagtcacactgtaacttcaacgaagtactagtagtcaactaaactacgaatccattcgaaagaggcggattttccgatcggatatgttgacatgtgaatacatgtagagagtggtgctgcacccatccattggagtcatcttttgaattgtccgcactaataacctaaccacgcttctgacctccatccgaacttcgtatacgcggtatactttcgactttcaaccattcctaaaactgcggcgagccgccacacgcatgaatccccccgccgcgcggtcgccctgttggccgtacaagcatgcgcatgatgtcgacgactaccggtagcgcctagtgatgctgcagcgacaccccgtggcgacgatgacgtggagcgctccctggatggctggcaagactgcggtcggcgcaacacaaaaggcgtcagagcccccccttcctccctgcgcgcgtttgaagagatgcacgagcatcaggccacctctcagtcctgacaggcaagtaaatgttcgggggaggtctatgcatcacttggtgtattcatactcgtgtctgtacgcgcagcggccagctttaaccggcggagacagaaggcacttcctgctccgctttcaaacagctttaccaggagaacaagcgaaagagcgcaagcagcatgcgtgatacttcagcgtttgggatcagttcgagggcggggctctcgtcagtcgggtacagcggtatcagtcgggaaaaataagcttccagtcgggcagtcgggtacggtgacgggtgatggtgttctcagtcgggtaccggtggtgatgtttgttgtttgcttggctaggtcaacgcatgcgctcaagttgtttacctgtacaagactacagctcgtggcgtggccacaaaaatcttgcgagctgttggtaggagttaacgtaagagaacgatggaaaaacaatgtaatggactgtccgagctgtgtagtgtcctgtactgttcgaaaattcgctccccgtaagcaatgcacttagtcatttcacttagaggcctcagagagaccatttgaaaccgaagcaaagcataggtctgcaatgttcggcgcgtgggccggaaggtatgcctaagtaggagtttctatctaatccaaacacctcgcctggccgagccgaggacttagcgtaaggctcgagggggtggagcaggtcgcgcagcggcgcccctcgaagtgccgttgctaagtccacaggcgagagccaacgtgagagtgtcctaccctctttaacatcaagtaacaagtgcttagtcgctttggtggtcggcattgggccttctcgaacactcttcatctaaccggtctatacatggagtatacaacttgctttagttttggtcggttcttgacggtcgtggtcgggcgcaaacgggtacaatagtctcgtcacagcctagttttccatatggtggacgggtgcagcaacaagtgccatacatgtattaatagtggttagacttggtatgcgcgcattggaaaagccatgtccgatggcgccagcagagccggttaacagtattttgataactcgaaaacactgagaggaaccgtagaacggtgtcgaattccccagagtctagggcccagactcaggaccagagcacatctggagataccggtacccgcagcctcaacataggctttcataatattacgcaaataatgcagtaccggaagcacggtctcatcaatctcataagaagaattgagcaacataggttttggctcgcaatccccataatgcgtgtacatttgtgtttgctgccgtgacgaatttttaaattccattctttgaaaagagttgcctccgcagcaaacactggacttgtggttttgcgttggcagtttaagcttaaacgttgctgtactggtagcgcagctccaagccacaagtgcccggttggtcataaggtgatatcgaagcaagacaaggctaccctaagccactcaatagtttagttaatagtctcaacttgagatgtacccttcggtagcaccgatgcctcgctcagaaacttaagaatcccgcgttagacaggtcgtcaaaagcgcaaactcaacgcgaccagcgttttactcgcttcatccgcagcacaaatgcacatgtattatattactagtactctgctcaattgtatcatcagttgagtgactcaacaggtgacgactcaatcccacggaaggacttccagaccataaatgcggggtggagtagggctatacataaatttgtttcacaacatgaccccctcccccccccttcggggtgcgatgcgctaccgaagagaggctcgtgagctcggcgaggtggttagagcacctttaatccgacagcacaacagcaccgttaatgtaggaaaaggaagctttctcccaacttggcattccttgcgcttctctatcattgcatctatccaatcaggacatgttcttcaatgaatttagccaatcacgatcgattcgtgtgtatcccaacattttccccattattttgggaatttacagtcttgctccaatacaaaagtgaagtgtaaatgttgcattactcatatttgaccgcaaattcccaatacaaatcatgattgtatcgttggtggctgtgcctcgtctgctttctctcctctctcatttgaaaagatgcagcgggcgccgagagggcttgacataccgcaagggacagcagggcaggaggcagcggcgatgaagtgcttcagcgaattcttagctcctgctaacatgaatgaggagtcaattgctagtattgcgaagtcgctgtctattcctgatgctctaccaagtcaaaacttttactctttgctaactgccttctccattttctggcaaactaagccaagtgctcgaggaggccgtcttgctaaggctactgctgtgggctatatgtcccaagttgtgaacctgctccgagagcggtaccctctgtagttgtcagacagcaagcgaattgcgaaaatacgcgacaaaatgggttcaactattgaggagcgaaatttgctagctggcgtgcagactggtgaagctccaggctgcacgctcagcgacttgcctgttctgatgcaggaaactgcgattaagggggttggctcacgttgtaagagtttgcatgacgctgctgtactaacgtaaatgtggcacacgtttggtcgagcggtcgatacctgttttgctaggaagagccagctatctatggcggcatcgggggagctttttctgcatctagctcaaatcaagacttcggtggttcaaggcatctcaatttacaaggccgcgacacatgtatactgcacggcctcggaatgctgttcgtcggagcgtcggagcctttcagctatgtgttcccgctagtgccgcacgaggcggcatcggatttgccaggggagaaggcctacagccatgacgaagctatactctactgggagaaccttgaagtgaaagctgaaccaaggaacgagccaccaacaaagcgcgtgagaggaaggcccacagtgttcaaatatattaacgacatcatcaccatggtctacgagcgccaagcccaagcctctgccccgctgcccgcgacgctcaccgcagggctgagcagccactccttgtgccgcggctccgcagcgtatgcgaacacctcaccgcagcttgcgatccagcggatctcgacccggggagcttggctgctggactcgctcacgaaggcgttcgagtacgtgagtaccacgacacgcgaggaccagagtgtcggcaaagtcctcgttggataccgatcccgcacctgccatgcgtcacgccaacgtttgccaccttgagcgagcttcttcctgcgctcgagtacgcccagctgctaaccctgcgcggtcagctctgcaagaacgccagcggcttcacggacaccacgcccaacgtcgacgccttagtcctggatgcggcgctcgcgtccctgctcatccatcttgacgacatcgcgacggcatcccagcaggagcaggctgccacaggcttcacatcgcattacctgtaccgcttccacaacgcaaccaacgtagcgctgggagctcggctctcgctggactcgtacattggttggggtcggcagcttcgcacggcttggcaaacggagaacttcgggcagctgggtgaacgcagcaatggaaacgccaccatacttgccacagccgtcacccagatgctatcgtccatcgcagcaatgcagcgcacacttcagaagctcgtcgcggtccacgagagcaagtccgccagcgctgacggtcctgctccttgtcgctgtgatagccaggccccgcaggcgaccactgacaccgtcgttgaagcgcactctcttgctggctgcttctacaactggtaaacactggagctgtggcacacggcaaccaaaaagaaacaacagtttgttcgcgctgacctcaaggcaggcgtcaacatcatgatcatagcagcagggcgagaggtagacgtaccaacggcgccactggaccgggacggcgtcacataccctatcaaagtgagcagaaggccggtaagtaccatctcctgactctaccgacatccaaccgatggcatggcattggttttgctattgcacctcacctgcgtaatttcctgtataagtactgggcccattcggaccgtgttggagtcctccaactacgcatgcccaagacccagcgagtgaacatcatcaatgtgtactcaccgcacagtggctacacctctatcgaggtcgaccgtttctacgaggatcttcatgcaatgctaacccacagcgcgatacgacatttatactgggcgacttcaacgcaaaaattggacagcaacgcgaacacgaacccttcttagacaatggggacgtggccgacgcaaccgcaacggccatgtactcgcctccttttgtgacgctaatgacttgtttatttctaacactgctttctgaaagcgcgcttgcaacatcacgactggacgctccgactcaaggaacacagcatcttcaaccaaatcgactacatcatttgcaaccagtggaataaatccctgtgtgtcaacgcacagtcgtggggcggtatcctcacaccgaccgaccacaagctggtcacgctggactttgatccccgcgcactcggtgggctccggtgtcgagttgccagagtccacttcaacaacgccgagactcgcctcgccacacacctcctagtgcacgaccaacactcccgactacaataccgtcagctactatccgctaagttcaccgccatgccacaccaggggggttcgccaaatcagcgctgggcgacgacgctgaacagcactggaatcagcagcagactcgattggataccttccactcactaaaagcgccaaaatgccggatccagaactagcacgtctctcctgcgaacaacgacgactccgtctagccatctacaacgaccgtgcgctggacgtcgattacctccgccgccgacgcaaccacgtacttcacaaaatcagggagcgcagcagacaccttgctcgcactttcattgacgagaaactaaccgccatagaccgctctagccattcggctaggatgttccaggccacgcgagtgctgcttcgacagcgctcaccactaacgtctctatgtgactccacaggtaaatacattctccaccgcaaaacagcaggcgccaagatcagacaacacttcaaggaacagttttacgacccgagccgacagcccgtccctagcgacagcgtggctcgccctctggagaggcccattacagccgacgagctcgcacgcgccttccatcgccttcgcaatggccgcgcaaccggacctgacgccataccagctgatactcaagtacggatctacgacactagcccaacctctcgctgccatactcaacgacgggttctctactggagcaaacattcatctgggcaacggaattctccttggatttccaaggccaaacaagccggctggtcaatgtgccagccttcgaccaattgtgctgctcaacagcattcacaaggccatctcgctcgtcgttctcgagcgcatctccccgaaggtcgaacgctttctgtcccctcaccagagcgggttccgacccagtcgcagtactgccgatgcagtatgggcccacaggtagatagcagcacgggcgcagagattcagggaacggttccacatactggggatcgatctctcccgtgcttttgacacaatcaaccgcgacaagctccttctggttctcgagtcgattgtcagcagcgatgagcttcgcctgatccgactactcctacaagacaccaagctcgccctccgattcggcaacgacttgctctctccgtttgagagcaacacaggtaccccccccaaggtgactcactctcccctgttctttttgttgtttacctcgaagcagccttacgcgatcttgccggccaacttgacgtcccccacgacctcctcgcggacatgattgtatacgccgacgtcgctgacttcatttgcagacacgaagatatcgctaccctgatcgagactcaagcaccagccatactgaccaagtggtcactcaagatgaacgcttccaaaacagaacacacaattgttcaccgcagcccgacaacccacaccacccggatcgctcgtaccaaggatgaagcctggcgcaacactcgcaagctcggctctctcctcggcgacaccgaagatctatcgcgccgtaaaaacctagccaccgcagcgctccactggatgtggaagatctggcttcggccgtcaaagacctcgcaagcgactcgagtccgcctctacaacagctacgtattgcccatcctgctttacaactgcgggacattggcgttaacccacactgacctccttggcctcgaacgttttcaccgccaacaactccgcaaagtcatcggcgtggtctaccctcgaaggatttcaaacaccaagctatacgaccttaccgggacggaaccgctacgctatcacctcctgcgcagccgatggcgattgttcggccatatccttcgccggcccgcagctatccctgcataccgctacatggacgcttacttcagaccgagcgagtcaagcaaatggagaggcagacaacggctcacgcttccgatggtctacgacgccgacctccagactctttcttccgggcaccgtcttcgtcgttctcccgatctttacctccttcgcctttgcgcgcaggatcgaaaagctggaagcagctgacggaggccctacttgcgtacgtgccgattgacggactctggtcgggagcagagagagaattagagagatgagagataacccgacgcatgcggaagttgacccaccaaggtggtaagacggctcccgtaacgcgttcacaacacaaatatacacaatgtggagggtcatatttggttttaaaaatcgccagttgcccatgtttgtggaggcctacccccccccccccccccgcgccaatctccttaaacagttcgtttcctttcccaacataatggtttttgccagatctgaatgggctcttgacaaccagcgagatccagccacgcaaccgagaagagcacgtaaagaacgaagcaactaaacttcacgtgtactcaactcaaatgcaacaacaaccaagtaagacgctactaaatgaagaacacgtagtgcttattagacgaagcaaacaaaaacctagcgctcggtttctcaaacgttcgtgagacgtctggcaaggcagggcataccgtcgcccgccctccacgcgccttgatgtccgcagcaacacaaaactcggctctacaggtcgacttcgttgttgcggtggtggtggtggctctcgtgctgcaccacggtgtgggtgcgctgcatgtggccgccctgcggctgcagtccgcgcagtcggttgccgccatggttgtagttggccggcgtctcctgcgcgtactgatgcgggttctgcaccctgggcgtggagtcgtcgcccagcacagccagggagttgccgcgcgcctggttgttgttgtagtactgcggctcaccgcccagagcgaagaaagcctcggagccctcgcgcgcgttcgtggtctgcacagtgaccgtcttgtcatccgcgccgccgtcgcgcttgagcttccacgtgcggtaaaaaatgtagatctgccggatcatgaggcacacgagtaccagcacctgcaggcccacgatggcgaaggccacgccctcgcgcaggtcgtctgggatgctctcggtgaagctcgtggcgctggacagcaggaagaagctcaggaagagcgccgagatcttgatgatgatgacaaagctcgacgtcttctgcacgaacgcagtggggtacggctgcttgatctccaggtacagcagaaacgcaatgtggaacgcaatgagcacgacaatctgccacagaccctcgatccagatcatgcccgtcgtcatacccgtcagcagagccagcagcagcttgggcgcgaagaagaagcggccttcgaagctgtgctcgtcgtacagcgggccgtaccgcgcgtggaacttcttgtcgaagtggtccttcgtgcccaggtcgcgcagctcgtcctcgttgttcttgatcaccagcacaccgtacaggatcgtaccgaaggccaggcacagcagcgtgataatggccaggaagaagctcaagcccaccgtgttgtggtcgatgcagtagcagatctcgtacatgcccgtagcgccgacaacgtactcggacagaatgaggatcatcatgagcacgccgatggccttgtccagccatttctggctgaacgccgcgaagtcgtccaccacgaagtagcacacgcccatggcgagagcgtaggcaccgaacagaacgccgaccatgcaggcaataccagccacagccaggtagaagagcatgtcggcctggacgccaatgagcgccgcgtacttctccataccctggacgccagtagtgctcgacgtcgatccagagccggagctgccactcgcgctgctgccagtaacaagacgacgagaggtcgatttggtcgtgtagtcgtcgtcatccgacgcagtcgagttgatcttgccgaaggggaggaaattgaaggcggctggggccatcttcttgcccatgttctccatgaaccgcggacgcgcgtccacgttcatctggttgagcatgatcgagaactggcagatatccaccgcggccatggtgatacccacactagcagcagccgacacacccgaagccacgccggcagacgtaccgccgacaacgccactcgccaccgacataacaccgccggccacaaccgacacggtggcagcgctgctaccgatcgtagtcgaagcaataccggccttgtccaccgtcgacttcttcgtaccgtcagaccagtggtccgagtcctcgagacccttgttcaccggcaccgagtactccgagttggacgtcgtggaagtgccggccgtgctggccgacgacgcggtgctcgtcacaccggcgcactggcaggcgctgaacgagctgtcgctcgtgtactcgcactccgtcgtggcagcgaacgtcaggttcgagaacggctgctgcactgcatcggcgaccgccgacgccgcctgcgtgccggcgtaacccatgagcgtgatgaagtccagacccgcgtacacctccgagttgatgccgtcctccgacgtgtagtcccacgtgccgttgttgcaggccgggaagcggcacaccgacatgcacgtggccaaatccgagatctcggtgcccgaggaagtgcccgagtagatcaaacactcggtggacgccgccgccgactccacgtccagctcggtgccgtcgcacgtgagccccatcttggtccacgcgccgtagaacgtcgagtcacacctgaactcgatggtcgtcgagccggtcgtgctgctgccgccgacaacgccggcagatcccgtcatggacgacgagcccgtcgttgtcgtggtcggagccgtcgtagtggtggtggtcgtcgtgttggtcgttgaaggagtggccgtcgtggtgcctggcgtcttggtagtcatcgacgacggagtcttggtcgttgacgtaggcgtggccgtcgtcgcagtcggcgccgtcgtagccgtcgtggtcgtggtgagccccgtagccgccgacgatgccgtcgagacagcttctgtcacgccggaagtgtcgaccgtcgtaccggcaagtgtcgtagcagcgccggcctctccagcctcgcccatgaggcgacgaccgccgtcagtcgagccggtcgtcgtcgtggacggagccgtggtctccgtggtcgtggaggtggacgatccctcggtagtggtcgcactgggggttttggtcgtagctgtcggcgtcttggtcgtggctgtcggcgtcttggtagtggacgtcggcgtcttggtggtggacgtcggcgtggtcgaggtcgacgaccccgagccggtggacgaggtgtccttcgaagcgtccttcttggacccactggaggacgtctcatcgttcgactcgctcgagctgtcggaacccacgccgacagtgccgggcgtgtcggaagagccgtcgccgacactgccggacaggtcgctggaaccgtcctcctgctcagtgttgtcgtcatcctcgtcgtcctcgtcgctgccggaggacgtcgtgctggtcgaggtggacactccgctcggcaggttcgttgccgtcggcatcgagtaccggaacacgcaggacacggagccggccgtggtcgtaatgccattgccgctgcccgacgaagtggacacctgcgaagttgtcccggtggacgtcgtcgttgacgtcgcagtggacgtggacgtttgcgccgctgcgacactgagcgccgcagctgcggcaactaccgccgagtacacgcgcatttttggtgttgttcctgttgcctgttgcctgtttaggtggtgtctaaccgctgactggttagcactatcctaaagcgacggggggttagatactccgcgcgaatgtcgggtgggggaaatctacgccgtgttgcttccggctcgatcggatccaagactcgccctgctgccttgccgctcgatcgccgcgctgatccgttcgttcctgcggcgagttctcgtgtgccttggctgtctctgctgagggcggtggcgattgacagactgaattgggagagccagcgtcgcgctggcagaggatacatgtatatgaagtgcgtaagataggcgaacggctaggggaaccgaaaagcactgggcggaactcaatgaccaatcagcgagcagatactaattttatcttggttttactataaggcttataagtcacacaaggtataacggccactcgaacgaagtgatacaccgcaaaatgcactaaccttcaccccgcagcggcgtcgactttggtgttaacgcttgcgatatgctgcgacggcaataacggcaggcgagcaacaaggtcccttcgagtcgggtgggtgggtgggtgggtacattgcatcgtttcccagcctaaagttatcaaccgagggaaaccttgaatcggccggagacctctggagtgcatggccaagtcgacgtgacgacccaccgctgcgtaaagaggaggtgcagcacagatgcacgcgaaagtctcagttctctctcttagatatgacgggcgactgactgggagctcagctcagatgcggccgcatgggagaagttcaccactgccgccgccaccttcggcctcgactttgggatggctcctttggtttgccgcgaccttctcgatctccgttatgaccaggcatgaactcggaaaccacctggtggcatctggtctccccttgccacgacatcacaacacgtgttgccatccaaccagatcctcgtcttgctcgtcttgcgtggtaaactgacgtggcagtttccccgctttttggtgcgagttgcagcaccacattttcgttctttgtgcggaggaaatccagacttccccggcaaatggatttgttttctcgacaaaacaatgccggaaagcttcactttccgttgacatgtacctcgccccgctcagctttgccaagtcagttcacagtcaatgcaaagtggcgacctgcgatctggctggctggctggctacattttgtgttcgaggcgagtcgatcgtcaatgaagatcaaaatgctagttggttgggtggatccccttgatcgaacagcgcacgctcacacgacatcgcaaaagttgctatgcaacttgcaaaggtaaaaaaatctccgattcgtccgaggtgaccacccttctcgaacgaaagcgtccacttgcaggcatagagcaatgcctgtacaatactgttcgtagctgttcaaccatctgcgccaaagattaccgttgagactttcaaggctcgtcgatgaagctgagctcgtcgaacgtgacgtacttgccggactcaaacgcgcctctgatggccgccacgaccccgcggcgagacgatttctcggtcggcacgagcgttccctgctccttcatgtcgttgaaccacttggcgagctgcggggccatgagcggcgactcgcgcatcgtcttctgcatgtcggtgtccatggccccgggcgagtacgagagcaccgccacctcctccttgttgcagttgccgttgcagtggcagccgctctgctccagcgccagcacgcggaagtgcatctcgcgagcagctttggccgtgcagtactggctcaaggtcggataaggagcgatcgctgatcgcgaggacacgttcatgatgaccagccgcggcgtcaggacatccgcctgactcacagtcagctccgaccttatggcgttgatgctggaggtggtcacctcacggccgaagacgtcgaggaagcgcttgttgagccacatgacggacgtcacgttgagctcaaagtgccgcgccatgacgctcggactcgggcattcctgcgcgaagcccaagcccccgagggcccccgcgttgtgcacgaggaagacgcggtcgtgacgctccgcccccgacgtcaactgaatcaacaacgcgtcgactttggtcgtgtagtcggcgctgtcgctcaggtccacgggtcgagtgaacacgcgaaggcgtccacttgacggcacagagcgtcgagcctcgtgaacctgctgcgatgtctcgttcagaccgacttcgtctcgagcccagaggaactgcggaacaacacaacaacctggttttcagcctaacaacgatagcaacaatggtgtgtactgccgtaccaggtccaagtcgctcgtggcaagctctcgagcgaaattgagggctaaacaacgcccaaagcctctcgaggcaccggtaaccaccaccgcacaacgcatgggatccgataaccagactgactcaaaagatctctcgctctcaacaagatactacacttcattcaatgtagccatgttccacttcaacttgaagacgacaggtacctcctgccattcaccggcggcttccacttgccgagcagcagcagacgcttcttcacgtccatggatatttccaccgcatcggacagcgccacggtctcggacgactcagcagcaacagtctcctcaccggttctcgtcctgttggcgttcgtcttctccctcaagcgcttcacgacgggactcgtcgggcgtcgaacgtccgcgtcagagtcgtcgctgtcctcaaagacgtcggagcgtcgaggttccgccgagagtttggccggcactgacaactgacggtcgtgacgccgagccatgggcttagccgcgtcttgccacgcgagcgcgtacgtctgccagtagaagaagacggcgctcttgagccgctgcgcgtggtagttaccagcgctctcgagctgctgccgtctgcgttgccggtctttagtcctcacgaaccagaaggaaagagcacgcttggcgatgatactgtcccgcttgagtagggctgctctgcatcgacgttcgtggtcaaccacccgcctccacgctcggaatacgacctcttggacgcgttgaccggccacatacttgagcttgacgacacacgagagcaacacaaagcgacgttcacgttgcttcttgacggcggcttgccacacaccgagacttcggcgtagcagtgtcagtgcctcgtgctctgcggcgtgttcgaattgctcgtgtcgctgcagttgagaggccaaggtggcgtggctccagcaccgccacactttgcgcagaagactctgctccgcgtgcattgcagcgagtcgcttgccttgtttcgcgttgacgaactgctgccaacgcaggaacgagcgctgagaggttcgagtctcctgtttgcccacgaaagacgcacaaagctggcgccagtacaggtgcttggctgcaacttgtcgccatgcagccagcatcttcttcgccttggagctcagcaagaactcatcgaagcgcgtggccatcgcgtgttttactgccgactgccacagctgaaggtgcttcctcagcacaaaacgctgatacaatcgacgcaaccgacgcgcgcggctgaagtcgcgccagcgactcaccgctcgatgtcctcggaagacgcacaactgctcgtgcgcagcttcagcttgttcgcgtagttgaacagcgcgttgagtatatttaagccacccccttcgcagtctattgcggatgtggaagaccatcgctttctgcagtgccaggtccttcacaacctggttcttcgtgaacctcctccacctcgtccaaacctctcgacgtctctgttcaacattcttcaactgcagactatccactgcaactcgctgccacctttgcgtattcttccaagtcttccaagtgacaaagtgacgctgcgtctttcgcagtcggagctcatcgagacatcgggaagtctgcttctgacgttgacaccacttccgccaacgtgtcaaaacctccggcagcaacgtatcgtagtgtcggttgccgaagtattccagcacgagtcgcgctcgcttagttcgctgctgattatctcggagacttcgagccgcgcgacgcagatggaaggcgtccatgtgagccttgacgcgctgtgtttcgcgatgagcctcgaccatcacgtttcggaagtcgtggcaccagaccagccagtattttgtcaatagccgagcgcgatggtacgcgtccagactcgcctgcaggtgtcgagcctcttggacgtggaatttccacgcccgccagtgcgttttaagctgcttccgctctcgtcgagccatctccgtgttgaccaagacccagagctcacgctcgcgtaggcggtccctctgaagctgcttgactcggcccacgagctccttccaagctagaaaaacggtctgcgctgacaccgcttggcgctgcttcgtgagcttgatgacgatccatcggctccggcgctgctggtgggcgaatcgctgccagcagatgaagaggagctgcaggaggcgcatgcggtagaagagctgcgcgtggaaaatctgccgccaccgataccaagcttgagggaggtcccaggtcacctcgaagcgctgcagcacgcgggccttcttggctaattcttggccaagcgagacgagttggcgatcgtcagcactagtttgtacccctaggctagctctaacaatgtccagctttgagccattgcagtcaacgtcaccttcagtcacgatactctcgacttgtgcagttgcagtgtcctcattctcgactacagacgtgccgacacgtagcagagcgggagggtccgccactaccagcaacaggctggctagacgcttcctttgcgctgtgaacttctgccagagcatgaaccggaaccgcaggtggctgcccacagcaacactcgccagcatcttccggcactgcgcgtgagttcgactgcgcagcttccaggccgtaaagatcctccccaccagctcaatccactgacgcctcgccgacttggctcggaacgctcgaatttgctgcgtcgaggtcaccgccttcctccacgagaggaagctcgactccacttgacgttgctcgccagcgccgatcatgcgctcgactttacagagcacgacgtactgcttccagtgcttaagcgcgtgcgcggaggccttggcagcgctgaagtcgcgagctttacggttctgtcgagtcttcacgacgaacgatttccacgcctggaacaccacgcgcgagcacatttgcgttcgcaatgccagagactgggaaaccttctcacccagtaacttacgccgagccgtgaacgcgtaccaggcacggaagcttcctttttgaaccgactgctgcatcacatccaggtaatgagccaacttctggcgtcgattgatccgatccacaacaaccgctctccactctgagaagctttgagctcgaagtcgataacatcggaatgcaacagctcgagcattagcgtgcgtctttctcttttgtagcagcgcgtacgcctgcaacgctctaagcgctttgaactgagtctgaagctgcatgtgagtcagcgcgtccctcatcttcgccttcgaggcgcgactttgagccacaaacttcatccagcagacccaaactcgcttcatcagctgggtacccgcaaacgcagtggacatgagcgtcatggccttctcgatcttctgcgtcccaacgaactccttccacttcgccatgcactgacgctgcgtactgcgcaacactcgggcttgaatctgctcctgaaaggcttgaagcacctttcgagactcgcgcgaccgaatccacactgtgaagtagcgctgcagcactcgccgcttaccggaacgcgagatgaggatcaatttacgccacacgtaccacgccttcagcaacgcagtgcggcggagtttgcctcgaattgcagcttcacttacgcgaagtgttttgcggtaaactgcgtggtcgtgcagcgcgcaaaggcatcggtacactgtctgcatcctccaccggcttagaagccttccacagacggctcggaagtgctggttctgcactctaatgtgaccccattgagtcaacgccttccgtagactaaagttgcgatggcgaagctctgcgcgggaaatcgtagcacgacgctccttttcgacgttgtgaacgagaaccaacgcgttccagaccttgcgaaggaatgcgctctcccaacgtagtgtagcagcgcgaattttacgcgaaagagcagctagatccttccatcgccagaagattgtggagacttgactgcccgacacagcagatctgaagacctgcgctttttggcggatcgtacgcacatactgctgctcatggactaaagttcgtagcgcgttaacccccttctgcatccggcggaagcgcaaaaatgacgaaacttggtgccgagctgcaacattcctctcagcgtgcaggtgccaggccgtgaacacttgagaaagctgtcgcgagttgcatttgcttgataaaatctgcacaacagcccgcagcttcttgtgttggtgactccacgagtgccaagctcggagggacgagcagagcagcaggacttgcagtcgctccgtgttgatctgcagctgtcgacggtggtagcagattccagcgacgttggtcttccactcggtgaagctccttcgcttgagtttgtcctcgaacaccacgcgagcggcggttgtctgcatgcgtttggtcttctcagtcacagcgaactgcctccactcagccagcaacgcagctaggagacggagacgcgacgagtggtagagctcgaggatctgcgcgcgcttgaggcggagcgaggctgcgactgctctccaagtctcgaacgcatgttcgaagacgtgcttcgcgtggagttgacgcgcgcgcagattaaccgccttcttgctcaacgagagagcgatgaacaccctccaagacttccacgaacgcttcaacttggctttggtgttcatcgcccggatccgtctctgttgtctctgctcctggcagaaccgagtccagccgtagaagtggcgcccgcactgcgttttgtgccacaactcgatggctttaagtgaatcgaggcgggtttggcgccgagattgagtcacgtcgctccagtggtcgaacactcgcgcaagttggacggtcttccagcgacgtagcatgccagcaagtcgaatattggtcagagggctgtcgacatcttccagtcgagaaactcgcactcgtagctggcggattgcagctttttgagcctgctttttaccgtggaaactgctccattcacgccacgcagcggcgagcaaccgcctcacataccccgaccgccggagctcttcacacgcagcgatgaccgacatgcgctgcgctactttcctcgcctgccactctttctgaaaagcttcatggacgcatccgatctgcctgaccaagtttttctccttgtgtttcatcgctgcgtattgttggaacccagcgaccaacactagccgcatgaggtcgagacctcggcgatgagcgaactgcttcacttgaatagacagcagcgcgaactgcttccagacacgcagacgatggcgaagctcggacgcagttcggtttccactcaccttttcacttagagttttgacggagcggagcgtccgagctttcgctcgccaattgatcatgcagattctcagaactctgagctttgttcgttccgagacgaacaactccgcttgtctgcgctgccgacgagagatggcaacgagtctccatcgtttaataacgtcgtacagaagaatctcgcgctgtccagtgagctttctccggatgaaagagcggagccgagcgtatcgtttccatcgcgcaaacgtagtagctcttgtgtctctcacccacaacagcgcaaagcgctcttggatgctctgcagccgctgcgctttgtactcgacgctctccctccacgcagctaacactcgagccaatacgcgactgcgcttcttggctagaaactcacgcgtggactggagcactagaacgtggcgagtccaagcgtcgaaaactcgacgcgaagtattctggtaccacaactcagcgcaacgtcgttgcagacgatcacgccgcgcagtcgcgctccactccctcagaactctgaagtataaacgcctcttgtataagttcgcggcacggatttggtctcgttgtttcttcttctgacgcgattcaaagcgcctccaagacgcaaaactacgggaaatcgctcgattcctccactgagcttcagcacacttcgcctgtcggtggtggagagagaactgagcccagaccttaaacgagtgtctttccagttgatggcaccgcagtccacgcgcacgtagcaagatttcttgctgtcgcttgcgagataggacgaacatattccaggctctgaaatatcgtggcagcaagcagcagtatcgaaactcagccgccttcttctccagagcttgagcgacaactcgtccctccacgtacagcctccagtttttgaaatgaagctgcaactgcgacgctgtcgacgccttggcggcgcgtgttagtgagcgcttcatcgtctttcgggtctggacaaagcttctccacagttgaagcttccctcgcactcggaagttcctcaaggatacagcccgagcagcaccatcccgtcggctgctgcgtctctgagcaataaaggacttccagcgtgaaaaactcgcggctttcatgagtctgacgcccctcgctaccgcacaagcgtgggccgctgtcagtctcttactcgactgagcgttgagcttcagcgtctgaatagatctcttcatcttgagcctttcaagtcgatctttggttacatcaagcttcaatgccgcctggtcttgagcccgccaccactttgaccacgccacgaaggccacttggatcaaatggtttcgacggtaagaaccagcttgagacccctgcgtcttcttctgctttcgactgagtttgttcctcaataaaccacgaaaagcacaggacagaagcgtctgacgtcgaaatgccagcgatttcactagaagacaactgcgtttgcgctgttccaggcggagggagttccagtaccggactgctcgcttggctttggagcgcagtagcttactctgagcctccagaatctggtattcacgagctgcagcagcttgatgggttctcttccaggcattgaaatgggcttcaagagctctttgcttggatgtcacctgggtagactcaagcaagcgacgatggcgtttgcggatggcccacgtcgtcttccagctgtggaaagtggcgtagagctgccggctttcccgccttgaagcgactgcggacagtctttcgtgctgccctcgcttcgctttgagtgcgtgtctccaacatttccagcgagcacgaagcaaacgcttgcgtattctctgctggacagcttcggcgtgtacaaggagttgacgtgtagaggcaacgacttgcttccactgccggaaacacgcgttgaggtgaaatttatccagcatttccacagctttcgaagtcctgtggcgacggtgatgaacgctataagcaaattgcttccacgcgcggaacacactcgacttttggtacctttgcagttgatcatcagctagccgagccccatttcgccaccaaaacgcttctctccatgttggccaagtcatatcgatcaagcgatgacgtcggacggaatttctcaattgttccccacgaagtcgacattctctccgtttagcgatgtgaatttgccagccatgaaagcaatttctcatgagtttgagaagttttctctctccaaggtttgcggctttgaactgcttctgccgctgcgactgcatattcgctaccaagaacttccaatgcagagccaacaggttgagtttatgcagttgctgacattccaggaaggcacaatgtcgcgctgacctcctttttgcatactgtctccatcgtgaaaacactttacccagaagatgaaaggaataaacagagcccagacaccgagttgcgctgcgggtgcctgtactctttcgccaccgattccaaacccctcgtcgtctcagttgaatcacaccagcaactaatctgtcttcaaggccggaggcttccacatgatgttttctccagccatcaaagcaaacggcgagttggctcgctgctcgagcctctctcacgtccgacagtgatttaccgagggatatttgtcgctccgtccaaccagcccaagctccgaacgctagcgcaagatggcgacgccgagagaagcgatggaatcgctctcctcgctctcgaaagtcttgtagctgatcaatcgccatcctccagaggcggataacttgatgctgtcgtcgtctttttgacgatatctgccacaaatccattctcgttcttgttgtcttgttacgcaaaacattcgcacgcaactcgttccacgagtcgctcattaaacgcagtctacgttgatcgcttgacacacacagcagcgctcgagacgcttgcttccgctccttttcccgcttccaacgcgaaaaaatccgtcgctttcgtgccatttcgaaccgatgtcgctcctcccgttgtttctccactgcgtcctgccaggaccttaaagctttacgcaccacttgactcctgtaatgttgactaacttgatgcagctgctgtctgctctggaaaacccctcgccaatgatccaaacacgttctcaacgtagaacgcccacaacgctgagccacccactgcgcgcgatcggtagaacacttcctcgtctccgtgaacagcctccagcgttgaatgcactggaacgcggtctccagcactgcagcgcgctgcttcacgatcacccgtacacgaaatgttttaacagcacgagcgtcgcgccgccattgttggaggaaattcctcatctgccacatccaaacgcgcttagccgagtacttgaacaccttcaagtcgactgaaatgcgtcgcaaaatacacaacggaagggctcttgggctctcgatcgcctggaaatccaccttctccggtaaacagagagcgatccagtggaaaagcgagtggatgcagagcggaatcgtgacttgctgctgtcgcgtcttccggtcctgcagtttgttctggtccacgagctgcttgaccgcttgagttgctcgccactgctcgatggacgtcgtgatcatctgaagcttgcgctcgcctgctgcgatccggtctcggcccttcgctgactcccttccgcttgaattatgtgcatcgtctcctttatcaaattgttcgtcatcctccaagaattccatcgcaagttctggcatcggagctactcgttcacctggagacggcttagcggtagaagctggagttgggaacttcctccttcgactcttgtcgtcgtcaccagcacggatccgctggatcggagagtcgagcgacaacatgtccccaaaccgatcttggtttccatggcccttcttaggcgtctccctcggcctcaacagaggtgaagcctgacggatagtgctgtgtttactaccagtccgatgccgtcttcgctcttcctcgaaggaattggactcagcctctcgagtcttagtaatagacgcggccgatgctgcacccgtgtcatgctggtgtgagcacaaccgcttcactctcggttgagcccccagatcaaagttcaagatcttcgtgcgccagtctcgcttcggattgatcgagagcgacagcaagtagcgatggtacaccgcgtcgtcaggtgggccgatcccatagcgctcgaacacgctgtacgacgcctgaatgagctcgatgagcgagatcgcctccgtctccacctccacctccatctcctccccccctccacccagcgcctgtcgacgagccgaagatttcgctgctcgcttcctctccgccaccacgaagatttgagtcagcaggttgcagaccatttcgcggcgtcgggactgagcgtccgtctcatgacgtcgggagctcgtcaccgcttggtgagcgacgtccgtgggcataatgcagctcagagaccagcctcaatccttctcccccctcgctgcagtttcgagtctgagaccaaagcgacggaggtcgtttcaaggctctcgctcggtcgccctttcacctcgactgactagctagccgaggtaaatggtggccgagatgttgatggtgaggacggccatggccatgaagagcaccccgaggaaggcgctgaggcctttgatgcggtcgaactcgatcccgaccgccatctccaccacgacgccaatgtagtcgaccagcacttccactgcgaactggaacaccagcatgcccagcttgcccagtcgccacgccccgtggtccgataacgtgctggtggcgtcgaacttgagcgctgggtagtacggatgaccggcgaaccagaacatgatggactgcgagcagccgatggaaatgtactcggcgtacatgtccgccgtccgctctgctgtgtggtagggtagaacctgtcgtcgccagagatcgaactcgagcttcaacgacgaagaacagggtggagatgaagaggattgcgtggtcttgtgtttggccacctgcgcctgcatcgtgttggcagataactggtgaagtttctcctcgactgctttggcttgtcggcgaatggaatagacaatggacagcgccttcgcagccctcatgcaaccttccaccatcgccataccaacggttccgatcatgaggaacgtgttggtctgcgtccccaccatgagaatccgcgtctgcgtatcgatgagaacggtcggaacccccaccagcacgcacatggtgcggatactttggacgcctctcttgataatgtaccacttggcggattcctggaggccgatcttgagcagcgcggtggaaactgcgaagagaacgatcacgacctgcccccggtccaagatcctgtacgaggacacggcgtggacgtaccctccagccagagcgacgagaacggcactagggagcttcctgcagtattcgcgccagaaactcgcagtccggcgagttagcactcgtggaagtggctgtcggggcgacgttgcttccgcagctttcagacgtttggctcgatgaccacgccaaatactcggagaccggactaacggcgtctttgtgtttcacggcgtccctcaccgtgaggcttcgactgcgtccttcgcaggtctcctggtagtatattcgacgtacagctaacgcgatgcccgcagagtaggtgagatcgcacagatcgcccatgtaaaagtgcagtttgaactggaagagctctgtcatcaaggacgtatggttcactagcaaggccacgcagatcattccccccattgacgcggcaaagtagcggatcgaccctttcatcagctttttcatgcagaaccagaccccaggctggtagtctggacatccgaagaagcgttgggtcattagtgaaggcatgtgggcgaccagcatgatgccgcaataggataaaaccgtccagatcagtgtcgccgtgaacaattcaggcagcgattgctgaggggaagccttgagggaaaagatgttgccaacgtagtagcatccgtttgtgaccacagcacagaggatgcaggcgaacgcgttgcgcaccacgacgatctgcatcttggccgcccgagaccattgcaagcgaaggcgccgacgcgctgtgtgagtacagtgtagctgtggggtgacaaccttgtgtttgagttggttcctagcgacgaaggccgtgagcggaccgacccgatcgccggatggcatcccacgtctgccagaatgacttgtgacgaagagatgactaaactactgcattaataacgcaggcagagaaggttacgagcacttccaagttaccccgtcagttatgtcgataagctggttgtttaatctccacagtgcagaatgaacattggcacttactttattcgcgcctacctaagtgcatctctggcctaacgtggtttgccggacttcttcgtcgacggcggtcgttcacgattgttttctttttgcatcttctaactcttcgttggttctcacctcctttagacatccatcgactgctggtgcttcatgtcacgcagctcgtcctggatctcctggatggtcttgccctttgtctcgggcacgtacttgagggtgaaggcgagcgccaagcacagcgcgatacagaacggcacgaacgtgtactcccccagctcgcgctgcatggtcgggaacatgaggccgaccaggaaactgcacgaccagttgaccatcgtggcaatgctcatggcggtcggacgcggcttggccgggaacatctcggccacgatcagccacgggatcgggccgaggccgatctcgaagaaccacacgaagcacatgacaccacccacactggccatgctggcgaacggcagcgcgttcatcaggcccagcgtgagtacaatactggagaaaatcatgcccacggccgagtagatcagcagcggcctgcggccggccgtgtccatgagcacgagcgccacgcccgtcgagatgacgttcaccgtgtacaccagcgtcgcgcccacgagcgggtccttcaggcccacgttcttgaagaacgagctggcgtagaacatgacggcgttgatgccactgaactgctgcgcgagctgcagcacgacggcggccacgagcgggaagcggatgctgcggtcgctgagcacggcccagatgcccgtgttggcgccggattcgttgtcgctggccgagcagatgctgtcgatttcctcatacacgtcgttagacccacgcaggcggcgcagaatgtccgccgcctccttcggcctgttcttggtcagcagccaccgcggactctccgtcagcagcgaggccagcgccagctgcaggataccgggcaccgccgtgaagccgaagagcaagcgccagcccggttgcgccagtccgttgctctctccagagtacttgaaggccagtaggtccgcggccaggatgccgatgaccatgaacaactggtagcccgtgcccagcgcgccgcgcaggttgggcggcgccagctcgccgaggtacagcggcaccacgacgctgaccgtgcccgaggcgaagcccaccaggaagcggcccaggatcagcgcgtagatgttgacggacagcgccatgatggcgcccgcgatgatgaagaggaacgagtcgacgagcagcgccttcttgcggcccagcacggtgctcacctggcccgccgtgagcgagccgatgggccctcccaccgcgaagatggacacgcagatggcccactgcatgtccgagtggcccgggaagatcacgtccgggttgatgccgccggtcacgcccgtgttgtagccgaactggaaggcgctcatgagcgccacgccgcagctcagcagcagcgggaacgtgtagccgggctcggggaactcgtcgtcggcgcccagcagcggctggtcctcgccgcgggccacgaggttggtgaagctgccccacgagctgcgcgacttgaggttggagaaactgcgctcgcgctggaacgactgccgccgcatgccgggcagcaccgagaacggcagctcctggtacagccgcttctgctcttcaactgcatttttgacaaaccacgcgcacacacgtcgcagatgttagcttgtcgaaatgaaaatgtcggaaatgagactgtcgaaaaaaggtggagtgagttttcgacacgcaccatagaactggaggttctgcgccgtgttgctgcgcttcttgaggccctcggcgatcttgaggtcggcccagctgccgttggtgcccagcgccacgtcgctctgcgaatgctgcatggttgtttcctttctctctctcctctctgggactggggccgatacgcgggcgcgacctgcttgagccctggctgtttgttagcgagcgagaaggcgaatgagccgacttggcttcgtccgtttgtgcgcaagatcggcgactgtcgcgtaacgacggcacggggggtcgtggcgcgggtttgctcgttttgtatagggagagcagcgactaaacgaataatgtgcagcgagctcccggtcgaattctccgtgcgcgcatattggcgtttgtatgctcgaggaaacgaccgagtcgtatcattccgccctcctcaagttcgatcataccgtcttttgtgcaatagggtgcgtatcttgaagggccggtgatcccactgtaacaataatcaatagaaaatgtgggatggatttgaacaaaacaaggtatactatcaaatcgcgagacaattcgcggtggtaacacgttgacgcgcccggcttggcatcatcagccaatgcgacgataagaatccacagtgctcattgcccacgatccagcacggtgtctatcggcagagggagagctcccagtcgcagcggcggtgggattcgacaatgtagacttggggtgacggtcacctgcccatatccaaaaaaaagaactcgtggctgctcgactgacgtggcaggtcaaaacttgttttagcatggtatccgttgatggacatcgctgcatatcctctgccgctgttagattcctacaacatcgattgctcagcaacgcagggcacacgagtggaggggagagtaacttgctgtttgttgtttgctgtccggccttatccggagcggaaccccagcacgaagccggccgcgaagccgctgccagcgggcaggctaaactccagcaccttcatgagcgacttgtacatggagtccaggtccttggtatcaaacacgccgtcctagcagtagcagcaacagtcagccttctgtcatcaaacaagcaagggaggttctctttgtccgtaccttgttgatgtcgaggtagttcctgacatcgcgctccagcttcttgtagtccacgtccacataccccgagtagctcgcgcactgtagcaggatgaagatcgttccgatcgccaccgcgccaagcttggacaccttcttgagtgcgaatcccgagcacgcgcccatgcagaagccccaggagatttggccgcccttgcccgaggccaggaactcgtccacctgcttctgcaggttgctgtagtcctccggcagcagcgctgcgatctgcgcgatcgcactggcagacagctcctgcaccttcttcttggcctgctccagcgggtcctcctcgctgcccttgctagcagcacagacagtcgggttttgctcgtccagcaaccccagagcgccgcacgccccggcagccagtgccgccgacttccagtaactcagagcgctgctgttcgccgtccgatgccacgtccgctgggtctccaccagctccagcactcttcaacgtcgaatgttgcatatgacatcgccataattggaggtacggttataactatgattggcatttgatcatgtttgtcatatcagacagatattctggcgaaatggccctcttacctggcttgggagctgagggctacagcggcgctaggcttcgcagctttggcgtgcgcctttagcagcggggcagcaggcgtctggctgaagtggcgcacctgatgcagcactcgttggcacgccggggcgccgccggcgacgaggactcggcgcagcatctcggctggcttgtgtgggcggaaccggaagtgtccgtagctatgggtacggtgtataatatgtgtaccacaccgaagttgaagggcttatgttgcgaaaatatgtgtaccacattcacattgaagtgacaatgttgccgtaaccggaacgttgctgcttgtgcgggggttccattggtttgtcacgatcagcaggtacgcgacgtgatctacatgtattcggtacgaaggcgtcattcatcgagaaaatgtacatcgaagagacggctaagctaaagaggaacagcggggacccagcgatcctatcacaggtttgctgcaggattggttgatacaacgtttcgataacaggcgcgtcagacgagtatgcatgctatgaagtctctgtcagagaccgataagaattcggtggagcctctgtcttctcaccgagctctggatctaccatcacgacaaccacccgttggcagttgcgcactcggaagttgtcctgcaggagaagtttcgtcgtgcttttgtatattggtattgtagctactgaaaagtacttcagtatgaacaaaccataccaggtcattcatttgtttcgtttacgagatgcggacacaaagcacttgtcgacgcggttaacgctgctacaaacggggccagcggtcgaaatctccacgctcgcgccagcaccggcacgagaatgcagtacagtagggtacatgtacaacatttatagcacgcgcacgtgtcgtcgtgtgctgcagagcgctgcaggagctctctacacaacgtcggcgctgcatttgtcacgagtgctaaacaagcggattggaaccatggatggagcagccgcgaggaggcgacgcatgtgtgctcggcgcaggagggactgaaccgtggtttggttggtggccgacacactcaactcgaatgcctcccgtttatcgatcgaaacggtgcgtaactcaagttgggcaagtcgccatcacggagttgtcttgaacgcgtgcaggctctgtcctgccgtcgcggtctcgcgaagcagagacgcccgcgaaagtaataaataggacgaagaggaacgccccgcacgaatggcaggtgaagcttcgtgcgaggtggacagtgcgcaaaccgacaaaacgacgctctgcagagagcctcattccaacaccgctggatatcgatggagcacgggcacccgaggaagttgagtcccaacttcctcggttgcccaatttgtacagtactgtaggtaggggagctttacaatctgtgatccgtcaggcgccgcaagtctatccatgcgaggtcgcgacgcccgacagggacgttacgccacaatgattttgctgttgacaaagaatggagccaccctgcgccgctccaagtgaagatttcgatgtggactcagctgagtttaaaagatgaggcgccaaagaggaaacaagaagcagcaaaatttgctgctacatttaatgtacatgtaccggtagcactgtactagcaatagcagtgaaaatggcggtgatggtcatggcgacaaaagaaatcaacagtaaagctgacgggctcgttcctcgcgaccactcattatcaaatctcgcagcacatgttgatggtcaaaagtggactttatctattttatgagtaagtttttcgtcttacagactgtaagttagttaccgtaatttagatctcatactacatatagctgattattgaagttgtcgtgttgcaaagtggacacgagatgtacatgtaccgacgattttatgttcgtattctgaagtgcatcatgcaaagtggtatttaccggtacccttaaacactgctgtctagatctatctactccacggcagctagcgcacccggtttcgaccttgtcgataattagatcgcgctggttcagccagttgtagacctgtcgctttttggcttttaattgggctgccgtgagcgaagggtagaagtagttgactgtgtcgcgcattttctccttagtaacgactgcgtcgtagaactcgatcacgctgagcttgtgttgaaaggagacagcaacacgcttaaaccgcttcggcagctttcctgttcctgttgtgcgtgtccgccctccctgctgacctgaagagcgggacatcactttccgcggacttggcgtgcgctccatggttgttctcttgcagtgactggcctcaatttataccctacgtattatgagagctcaactaaatggcgcgatatcattggctaatgcctactatgaagtaagagatctgtctgtagtatgagatctaaattacggtacagtggtgcgatcgcgaccgaaaaatggcggcagaagttgcagtcgccaacgtggagacgattgagttgaccaacgcccccctgggggaatttcttaggcgtcagggatgccatcgacttcgcaaagtggcgtgcgtacccacatgagtgcacgcacacctgcaacagcaccgcgcgggactgctccaccacgcttccgctaccacagcacgctactgtagcaggctggcgaggcatctctctgaacttgcaagcaccttgcagtttcgccagagaacagcagcaaaacagcaatacgacgctttccagaggcacgcagcgcgttgctgtcgttgaagatacgttaacttaagtccaccgtccgcatgctttcagctactgtatatgcaccttaccttctatggaggcatgcgagtcactcactcactttgcggcgactgtcaaagtggcgatgcgtctcactgcttgaaacggatcggttcaggactgaagagcttgaaggttgatagctaacgcgtcaagcgttgcacgcaaggtgccacgaatgatcagcccatgacagcaagaccccaaatggagcttgacatcaaccgagccgcggttgatgcccccaagctcatgtccgcattgcacacgacgggcagcagacagtactctcggcggggacctgtccatggtgccgcggcgagatacgggcgatcgatgggctggacgagcgaagacaaagacgccccgcgcagtgcactgcacagtgcagtgcactgcgccggtcgtagtgttcgtcgttgtcatttagacaaacgacacagagcgcccaagtcgccaagccatggccaagtttaacgtgcatgatgtggcgctgcccgacatcaagttgacgccggagcgtgaggctgcactgatcgctgaggtggaggccgtggtgcacaacacgctcgagctgcgctcggcctacgctgccggcggccgccagctcgacacgtcggcgtggaagctcgtcaagaccaaggacgatgtgcgcgcctaccgttcgcgtcgcgcgctgcatggcgtggatccgaccgaagcgcgcaccgagtcatcggatgcgctttcgtcgtcctcctcctccggctccagatcgaccatgaacaaactctcgagcattgcgtcgtcaacctcttcgaacgacagcgagccattccgctccaagaagacggcgcgtccgcctgccgttgtgctcacgggaacggtggacggcacagccgaagatgccgtgctgggtatgctggccgattcggagcagcactgcatgatgcgtcagtcgtaccttggcacggagctcgacgactcgcgcctgctcttcgtgctggcccgaccgacccccgaaaacccattcacgttcatcggtgtcaagtggggacgtcagacgtacggccgcttcagccaggcccgtgacttcctcttcttggaggctacaggtatcaccaaggacgcgcgtggagagatcgtcagctatggtctgcgccagtcgacggacttgtcggacgtgctgacactgccgcgctcgcacgaagtgcttcgcggccacctatcggtgtgccagactttcgccaacagcggcatcccggtcgttggcacgcgccaccactcggtcgagatgttctctcgtgccttcttgcagctggacggcgacgtgcctgtgaacgtggcggctacggcgttcgcagacaagctcatggcgctcgtgggctcgatggagtgcgcaaccgcctacaagctcacatggatgatgcggcagtccgctcgccaggctcgccccggtaccagcgtgcacggctccacgagccattgctccaactgcacacgcagtcttagcaaattcagcaccttcctgctccagcgcggaggcacatgccagatctgccgccgctcgttctgcggcaagtgctcggtgaacaagaagatctgcgtggggctggggagcgaggtgatacagaagaacatgctcttctgcctcgagtgtctactggaggccaagcaagtctcggcgcgcgaagtggctgtggaccagcagaagtggtaggtactccgtccccgtcgccggggtagttagactgagagggtgcgtggtcctcgatgaaaggactgcgcggcacgcaggaagctactgcgacgaagtacacttacttagagcgcgtcagtatatactcgtcccttccccctagggctctctgtagatacgatttttcattagcaatagaagacatcttcatgcttatcgtgtctggtggtgagcgtggcgacttcagtttgcttggataatgtcaatttcggcttggtgatctgtctgcattcacagccgttcgcctggaaagccaagcggttcgccatgaataaaacatgatgccaggtgttgcctgtgaaggtgtccgaggatgaaagggggtgtaacttagcacgctagtcgcgaggcagcagtttggagcatctcgcactcgaaaatgatggaatgacagcacttgttgccccaaagtgtttattattataatacaacgatttagagaggaccaccaaacgtgactgaccgataactttgcggtccctcaagaagtaagaaatactcggagcacccaactcgagaaccccccctcccccggattgcgggggtgcgggccgcacccagcaagcgagtaaccccttggaggatcgagccgggatcgtctttcgccgttctcactacagtacatgtgcaggcctccctaattgggggaaatcctgcatttcccccaattatgtagattaatagggggacgacttgaggatttaaaatgggtatggtggggacgatagtgaaagtaagataaatatcttagggattggcatagccggtgctaatttggattcaacctacgatattcagtgttacggttcatccgcatacgaattagctagaaacgaatgtcagcgaaagaattatatatcactaatcgtgataaaagttttgactagctctgtaacttgcttgatcggtagggcttacgtatttatattggcgccgctttacttaaattaagtatgtaatttattagcattgcctatgataaaactgctccaaaacttgcattcttctgtagcatcgcccacagaccaacgtcctcttccagttcgcggtcagctcgccgtccgtttgagcttgaatgctacttgccaataccaccaatttcggaaatttgacgatatttgtgatgagtggggatggtttggggggcgatccattaccggagaaacacgcttccacctgggtatgttcctgtttgtttggggtctgaatgagctcgatgcttatcaagatctgaaaatagcttgccaacatgaattcacctcagaaccagggggatgggaacgggtcttaacaggggtatagtgggggaaatggggaccttttcccccaattagggaggcctgtacatgtgtatctacgtaggatagtacacttcaaaagtgtactacagtacttcgttgctcccccctcacgtgcatgcacatgtgcagtagaggtaggatagaggcgtcgtcgccatcgcgttcgcaaacttgagctgctggaagatggctctttactaacgctggacaccgtcaaaacggccacgtgccttcaacgactgcatctgttgttgatcaacacttccacttgtactgtagatcgccgcaagcagcgcgcagtgttcgtcgatggagtcggttgtggctacccatgacgcaaatgggtgtccaacacataacgttgatcgacagtcaaggaaaaagctaccagcctagattccttcactgctaaaaaataccaaaaaaaaactgtaagagtcctgttgagtcacggacacacagacacatcagatgccccagtattcaattgaggggaacggcacgctgttagtgctcctcagctggtcggtacgtaacatcatttcttccaagttattccagcgcgcacttgcgccacactacaacttgggttcagtgtcgccacggcctgtatcaactcgcgcgttgtcaacctaggataaaccgccccaatatcagagctttttctggcgtcactgagtctatgctgcttgcaccgagcctcggacgttcggagccctcaaattctcaagcgtgacatgtgtttgcagccagcgtttcaaattgggcacggatagtgcgcgcgaagccgcccttgacaaggaattgtgtgccagagcagcgctgagagcacatcccagtggcagcccgagataacggcgatcgatgtgctggcgtgttgatgctggtcagcagctccctgcggcaccgcttcaaaccagtcaatgggctaaccccactgcctgcactcacgcgactccttcatttggataaagtgctcggagcgcgcaagcgaggtagagagcgcagtcagtcagtcatcatgcccaggtttaacgtgaaggacgtggcgctgcccgagttcacgctcaccccggagcgccaggctgcgctgctggccgaggtggatgcagtcgtgagcaacacgctggagctccgcagtgcctttgccgcgggcggccgccagctcgacaccactgcgtggaagctcgtcaagaccatggacgacgtccgcgcctaccgttcgcgtcgcgcgttgcacggcgtggccgagatcaccgactcgcgggccgacacggccgacgcgatctcgtcctcgtcctcgtctcactccaactcgcagcgatccaccatggacaagatcgccagcttagtatcgtcgtccacctcatccggtagcgagtaccagcagcgcaagcccaggaagacagcgcggccgcccgccgtggtcatctccggtgtcattgacggcacggcagaagacgccgcgctcggcatgctggccgacacggagatgaacgccaagatgcgcgagtcgtacctcggcacggagctcgaagacgcccgtctgctcgctgtgctcgtgcgcccgacgcccgagaacccgctcaacttcatcggtctcaagtgggggatgcagacctacggccgcttcagccaggcgcgcgacttcctcttcctcgagggctccggcctcacgacagacgcgaacggcgaggtggtcgcctatggtatccggcagtctgtcgacttgtccgacatcctcaagctcccgcgtccgcccaacaccatccgcggcaacatgtccggctgccaaacattcggcaacaccgtccacctcaacagctcgggccaccggacagtcgagatgttctcgcgcgcgtttctcgagatggacggcgaccttcctgtgaccgtggcggccgccgcatatgcggaggcgctcatggccctggcctcgagcatggagtgcgccaacggccacaagctcacgtggatgatgaagcaggccacgcgacaggtgcggccgggcaccggcagcgtcctcggccgcgtggtctccagtaaccactgcgccaactgcacgcgcagcctcagcaggttcagcacgatggtgctgcagcgcggaggcacgtgccagatctgccgtcgcatgctctgtggcaagtgctccgtgaacaaaaagatctgcgtggggctggggagcgaggtgatgcagaagtccatgctcttctgcctcgagtgcctgttggaggccaagtcgctccccgcacggaatgtggcgctggacaagctgaactggtaggcatatctgttttggggctctgtagatagatattgaatgaatccgaacttgagtattagttcctcgcttcgatcaaggccagctcagagcggacttataagctccggcgttgtcactgtgattcaggacttttcattctgtcgtcgcgcgacgggttctccgtcgatggctttctatggagcttacacagtaccagtcagcatcaagccgtcgagttgtcgggcagaagggcaagataatgagcttcttctcgcaacacagagtcacacgtgcatcatgcactgcatgcggtgactgctgtcaagaaacaaggcgaacaggtagaggtgaaccgagcgagtaatcctcgctgacagccaaaccctggcgaccaagcccaacgccgggacgaacgggtgcagcggcgtgcgttgctagtcaaatgtgaccctaggcactcagctcgacacttgaatgggagcccgcgtcgtcgagctgagctcgagtgccggaccgctgtgagcttcggggaggcttggggaaattttgcgtttggcccgctattcaggttctcgccggcttcaatgcaggcctttccaactcgaccatcccatcaacattgagatcgcgaacgctctcgttgaacatgcaagtttcgggactcgggagttttggtgcaagtcaaaacaacggttgatgtgacggagtaacgctacacccctcggaggcaacacccacagcggtgccgccgcctaagatgccgtgagtttttgcgtccggccatcagtgccaacctgtgctgaacgaataccacagagggcggactggaggaaatcctacggcttcaaatcactcgcggcgacttcttcagcggcatcatttcgctctctccgagcctcgagcacaggaggacctctcccctctggagatcagtatcaagcataatacgtgaggaccgaggggggtcagcaagtgtgcgaaggtttttagagctttgggcggaggtgaccggagctgtcagcgtgtagagctcatgacagtaccaccaaagcggtggatagccccgccatgcatgacgccacaatccgcactgtcgatggggccgggaagtcgctcttctccctgtcaccttgagcttggtgctctcggcttgtggcgccggaggagctgctcgtggttctgaggcggcgctcgactggacgatgtagacgtctctgtaactctcaccatgcgcactcttcctcgtgtgctgcaccgatttgacttcacgttggtctttcggggcgccaaagcatacaaactcatcgagtgctggcgcatttacgacaccccccagctgctgcgtcagtcgcgacgccgcgccgagaggcaggcgaggcgatgcggcgtctttggcagacgccaccgctcgccagggccacaacccaccgcgggcacgagcctttcggagcttcgcatccagtgcccgcactttcaaactttcaggtcatcgggctatcggatagtagactgagtggctggttatcaaaccacccctccgaccaattgtagcgttctcgccattcagcagcttgcagcttacaagacactcgactgacaggcatgggcaagttcagactacccgagaccttgccggagatccagctctcgcccgagcgccaggcggcattgatcgccgaggtggacgcggtggtgcaccacacgttggagcttcgtggggctttcgcggccggcggtcgccaactcgacaaggaggcgtggaagctggtcaagaccaaggacgacgtccgcgcgtatcgttcgcgccgagctctgcacggcggcgggtcgcaccacgagcggtcggatgtgctgtcgtcttcgtcgtcctcggactccgcctcgcacaggtccaccatggacaaaatcacgagcatcgcgtcgtccacttcgtcgggtgacagcgaccactacaggctcaagaagacgacgcgtccgccggcagtggtgctgtcgggcgtcatcgacggcacggcggaagacgccgcgttgggcatgttggccgacacggaggcgcacgcgctcatgcgcaactcgtacctgggcacggagctcgaggactcgcgactgcttgcggtcctggtacgtccgactgccgagaacccgctcaacttcattggtttgaagtggggcttgcaatcgtacggccggttcagccaggcgcgcgacttcctcttcttggaggcatcggggttgatgaatgatgcgaagggcaaactggtcgcctacggtgttcgccagtctgtggatatatcggacgtgttcaagttgccgcgtgctggagatgtaatccgcggacacatgtcgggctgccagacgttcgccaacacggggctccctccttccgacgcgcgccaccgatccgtcgaaatgttttcgcgtgcgttcctcgagctggacggcgacgtgcccgtgaacgtcgcggccaccgcctacgccgagaacctcatggcgctcgtcaactccatcgagtgcgccaactcgtacaagctcacgtggctcatgaagaagtcggctcgagctgcgcatgggcgtctgggctcgcccacccactgtgccaactgcacccgcagcttgaacaagctcagcaacctgctgatgcagcgcggaggcacctgccaagtgtgtcgccgtgtgctgtgcggcaagtgctccgtcagcaagaagatttccgtggggatcggcgccgaggtcatgcagaagtccatgctcttctgcctagagtgtctgctcgaagccaaacaggtacctgcacgcaacgtggcggtggacatgctcaattggtaggcagtcatacacgtaggtagatattgcacaacagcgagagcaaggcgaggaggacaaaaccaactccactcaacctggcttggccccctgtatatactaaagttgaagtacttaagtaccaaaattctggagtgcgtgccgtgaagtatcgaactcggtgaaatacttgtgtaggtgcagtgtttacatgcagcagatgaatgtaacgtgcttagtcctgggcgacaccttgcgtcgacagcaacttcgacagcaaaaacgcttggataggacagcagtgaaagaagaagaagaagaaattcaccttggcagtcctgtcgtaattctaactttcagaatctaaatgtttctgaatttagaaaatagaacatctccgatctatgtcgtttaaaatcggtagaaacgttattctaataacatttaaaataaaaacgataaatgtacttcgcgagggaaataaattccgtgcgacgcaagtttattggttgaaagcctgcccattccaaataagttttagcacaagaccagtgtacactaaaccaaatatgtatgcatcgctcttgcaaaagtattggtacagcttcccttaatggtatttgccagtacgttaaccaagagtacgtgatgaggctgacacccagagtacaattgaggacgacagtgcaattgaggacgacagtacaattgaggacgacacctagagtacaagtgaggacgaccgattcaagtgtagctacgccgtctcaacagtataaccttcatttcagctttttctgtcgaaaccggcaagtcgtcaagtcgcacccatggatctcccaacaaccagtccgctctataacgctgctatcgccgctgccaagttcgcagatcagcgcttagaagcccggacacggactgactacaacggtagtctttagcgattcgcaaagctctgccaaaggcaaggttatccagacccgctgaagcatcggtttgtggagctaccaggcgttgtagcagcctacatcaacgagctcgcgactgcaaacacaagccaatggcccgtcgagaagcttcgcgcagcgctctgttggcactacaccaagccggaaatgcttgcaggtggtcatccccacgatcgctgggtaattgatacagctcaggacggagcacttgttccccgcggaaacccagctcgatcagccgccatcacccaaatcctagctgggctcagcaagtccaagaagcgtgaaaggacacccaagcgtgcgtctccgatgtcgctgacaatgtgacacgaggcggtccccagaaaattgccgacgatgtgccgtcacctctgtgacctggagtttgtatcggatgctgattggtggatgacttggatacggcgcggctgtacccgtgtgacatggatggcgactgtgggatagaagtgatttctcgggattaatccagcgtctgaccgcagatgggcccaactggctggaagtgtgaatcctgggagtgcacgctcagaatttcagagaacactcagtccagccgcggactttcccttacgatgagtgcctaaagtctggcggaaagtgtctctggagaatgtatcccagagtacgcctcatcttgctgtggctcagagtgccccagaggatcaaattaccctgagaatcaacccactaccaccgtgaccatgcgcaggaggccactaaacccactaaaagtgtggctttgaggagatacacacgagtctgcactgcagcagacttgttacccagagtgccgcacggaaaacctagagtgccgcacgatgacccagagtttacctccctgagtgcaggtgacccagagttccaaagatgattccctgggtttggaccataaatccagactctctatactgaacttaagtgtttcccgagccaacaccaagaatccctacagttccccaagattcctcagaattcccaggatttcagaagatgaccctgagtgtcacctggttttcagggattcgagtcagttcgaaggcagtctgcaatcaaaatgatgcgtgaccttgaagaaccgtcatggatgcacagactggatactttcgaggagtcgagaggaagtcctgtaccatactaaaccaagtctaaggacccacaattgtcactttcgacgccgtgcgacaatggattcgcaagccgatcgcaagattggaccgctgatcccaaggtatactcaagacaagacattttgaccccaagcatagtgaacagaagatatttgcccgaagaagagagagagagaagtagctgataaaagccaaacagagttccttttaccctgtactgcgcaagtgacttcggtcaagcctgccgacggaaatccggaggacccgagactacgaccgcgggacgctaagggcacatcaacggcgaaggacagccgtctgtgtgagctccatcaaactcaagtccagttaggtggtgccagcgacggccctgagcttcctggggtgatccatctattccatatcctagttgggtcacttgctgtgcacgtggtagcccatttcatattattcagagggtattctgggggtgctaggtagtcgcctccaggattttgtattgactgcttgtgtgaagggaaggtaactgatagtgattgtattttcctcctttattggaggtggtgcgcgtttgtgtgagtctcaggggagctaggcccctgaatttcagactcgagtgagcctagtgtgtgtgacccaccgtccaagggtccaaaagaataagtgacggctagttgtagtgtttgtatactctgtatttgttggttttatcgagctaagagggcatttgggtaaggtgtcttctgagttccaagtcccagagttgactgaaatcctggaccctgaattcgtgatattctgggtttcgggggatctgattctctgggtttgccttttggtgtggaggtgcgttctgaagtagacgtgcgcttccgcacttcttcgaggctacattttcaaccggtggagtgccgttccgtcgaagacaaacgatccgacagggattacacaaggtacccacgccaaccaaggagtgtgattctcagggtttaaagctttgcggctgcgaatctctgggtctatcttcttgctgttgactctcaagtcgattctctgggtctacccctggggaacagtcttgggctgcgctatacgaacccccccccctgggcgacaaaggtttcatcggcctcgcctcagctggtacgcgtgcccggaatcgattgtcgaggatttcacgggaatcaagtgttgaagaagtgttgagtgcccgtcaacttcaagctaccaagatgcctggaggacgaggggcgaagaagagtggacgcggtgacggaggacgtactgaggcgtcacgtcagtcgcgtcgtgttcaaggtatggagcctgaggagcacaaggacctggaaacagtcgtccgcgacgctcggaaggcgaagaaggctgctcgcgagagcgaggcagtgcaaggtggggacgtcgaggcgtctgcagtccaaggtcagcctgctgctggatcgcaaactcaggaggaataagtttcccctgggttccaaggttcgacggaggtgaattctgggtcgcggattcctgaagtcccagaggagcacacccgcgagggtggtgttcaggcgtctgagggaggcgccaatgcggttgagcccccggaggtggttgacttggtctcatcttcggacgagtctgttgtggaagtgaagtcggagcccgtgcgagcgaaggaggaggcgaagactcagagttccaaggtgaattctgggttcgcaccacctgaacccagagtttcagcgccaagttcgcaagcggcacgcctgaaagcgacatccgggaagctgctgcgcctgctccggaatcgggagcagcggcgttggacgccgggagcatggtgctgtacgttcgacgtgaagttggacgctgggaagaggtgaatcctgggaaggtgacgccaccaagtgtcgtttatgagtggctgactccgaaaccggatgccaactcgtacttcgcggccgcgtacgcaacgggagactacctcaagtggcgtttgtctctggaggatcaagatgaagcctggatccctgagtttcacctcgcccggtggggcgtcggaactgctcaggatctcatggcgactacgattccccagagtatcatgaccacccgcgagtgcgtcgccattctgcagactctgttcttcgaagccggatttgagtttgtcaatttgatccctggctggtctttgacgcgtgcttccaggattccagaaagtctggtgcgctctatcatggaggaaacccagaatttcatcgccgtggaactggtcgagtggagattggtgatagctggtgtgcctttcagggtaaactctgaagatcacgccgcaccaagcgcccaagagcaagcaccaagactggactaccacaaggaagatggagacgatgatctattgatgacggactacgatgcggatctactgggccgacagtttgtcctgagattcagagtcactggactcaggatttcacggagcccacgagggtcgagtgatggtgagccacgatccaagcgtacttagcatggaccgcctcgaccacaagtcccgtcaacgccatccgcgctgtctacaccgtcgctgtcctctcttccagcgtacaagtcttcgactggtgcctcgcttcagaattccactcccctgaactccatgtccaatggacgtgattctctggaggcggaagccaaggaagctaccccaggcgcggtgccgagtgtcatcggtacctcgcgcgcttcggatgagagtactgcctcgggcgttcaaacgtcttatggtagctcttagtcttcgtcgatgatgtcgcttggacaacgagttggagctctagcgcttgtggctcagagtaccggtggctttgcagctgccggtgatcttggatttcaggttacccggacagtcatcccgtcgcgtattgtgtcagtcgaccaaggtgacgttgagatggcatcgtcggtgcactctgacgcagagatcgcacccaggaaggccggtctccccaggatttcagccacgacttccgagccgaaactcagggtttctgcctcgattgctggatttggtggtccaagggatgtcagcgccgatgagcggagtcaacaccagagctctaagagcgaggtgcgctctcgacgctcgacgaaatccagaaaatcatctgcgtcgagccgctcgagtggatccaggaatcttgggtcagtttcgtccgtgtccgcgaggtctgggcccgcccaatcgagctgaacgtcttgcgacaacagcaggagtggcaggcccgcatggaacaggagcaacgcgagtttctcgccagagaacgcctggatgccttggagcgcgagcgcctcagggaacaacgtgacctggacgcgcgtcgccagatccaggaacttacggatcgcttggtccacgctgagatcgcccgaggagaagcggaacggcgtgcgcaggacgtggaggctcgccagacccagtgttccactgaaactcaggggatgacccagagtatcacggaagctgtacgtcttgagcgtgagcgcctggatgccgcctacgccgagcgctggcaacagcacgaagccgaagccgactcggagcgcgcgcgctcggtttccgagacctacgccggttggaaggaacaactgtcaactatggagcaggtccaagaacttgaggcggagaaagagcgagagcgggagtcttccgagaatatccagcgcttccacgccggccaagtgcgcgaccttcgtgcaacattggcccaaattcaagcgcgtcgcgcaaccggcgcccctgatttggcaacaaatgtgaggtcgtcagtggctcagaaccctgaagtcgcaacccgaccccaagaatccagtggcgtaatcaacggaaacgcaagtgtcacaggccagagacaggagacagctgatccgaagaacacttcctaagtcgccgcctcccagctaagagcgaccctcgcgcagacttccgccgacacttccggcagaatcgcgcgcgtcaagcggggacatggcgctacggagaccaaggtgacgcaggatgtcaagctcgagcctgtgtctctggggaagacgtcggatcccaggagaacagcgacctctaaggcctcgcaggactctaaaacagactccaagcgctctgcacccaagaaacaccagcagaagaagaagaagcgtcaggatgtcaatccaccctctgactcagatccaagctccgattccagcgatgatgactcgtcctctgagagttcggatgacagttcggacgggaaccctggggttaacctgacgacggcctctacggctcaagctggcactacgctcctgacgttcagaccgtacatcaactcgaatactctgggtgagttcgatactatggcgtcactcagggaacgcgtgcattggtggaagcgttttgcgaacatggcggctcagggaggttggtctacgaagatgcgaattcaggaactcaagttcaaactctcgggagctgcgcgtgactgcttcaaccagttgcccaaacacactcagcgtgactggaaggagttggtgtctacattcaggaagaagtactgcaaagcgcgctcgtcgtactctgaacgttacttcacgatggagatgaagaactcagagagcgccctggatttcttttatcgtctgaattccgccgctgggaaggctgacattgactttcgcaagccttcgaagcgcctggggaaacatatccggaggttcatcatgaaactcagggacacgcgcctcaagacgtcgctgcagggccagagattcaggagtatcgctgatctagagtacgccctggaacaggacgaagatgtctggagccgcagcgaccatgacgctccgccacccagagttcgtgactttcgtgccgacaacattcctcagggacgtttcaagccgaagcgacaaggacgtgcgtatgtgactaggggtgatgtctctgactctgagtccgacgaagaccctgaaattcacgcgcgtttccaggaaatcacggacgaacccagagtttcagcccgaagcacgagcgcgaattcagggtcaactcgtgagatctctggagaagaagcttctacgcctagcgctgggagtctggcgagtatgaagggtgccgagtggactcagacgctgacgaacgaggtctatcgtgtgatggataacatgggatggcgtccaccgaacgcccaatcaggaccgaacacgaactctggattccgttcccctcgccgcgaaaacccgaattgggacaagttctgcgagaagtgcggcaagtggggcacccagaggaaaactgctggaaagacgtgaagtgtgatcgctgcctggaagtgggtcatccgactcacttgtgtcgcgcgcaaccgtgcgagaactgtggcaaactgcatctcgggaaaccgtgtgaagactggaagacactggaagctgtgaagaaactcgcccgccaaggtgcactgaaggatatgccgagccaaatcctggataaacgcctggatggcgaagcaaactctgggagaccgtcaaaccaataagccgctgggtggggacccagtacgcgccgggctgaagaaggccccagagttatgtgttctagtgtatgtaggcccggagctgagaacaagaacccaagataaccaacaatgcatgactactttgactcaggatttcatgacttcccctgaaaatcagcatcttgaacaagcgaactctgggtcggtgaactctgaagaaattgtggagtacaagctgaaccctggagagcgctacggatggtgggaaacaatgatcctgacccaaagaaacgtgatgtggcgatggtgcatggtgctgtgaacgactgccggacgagagttctcctggataccggtgcgactgtgaatattgtgagcttcgacttagcaggattttgtattgactgcttgtgtgaagggaaggtaactgatagtgattgtattttcctcctttattggaggtggtgcgcgtttgtgtgagtctcaggggagctaggcccctgaatttcagactcgagtgagcctagtgtgtgtgacccaccgtccaagggtccaaaagaataagtgacggctagttgtagtgtttgtatactctgtatttgttggttttatcgagctaagagggcatttgggtaaggtgtcttctgagttccaagtcccagagttgactgaaatcctggaccctgaattcgtgatattctgggtttcgggggatctgattctctgggtttgccttttggtgtggaggtgcgttctgaagtagacgtgcgcttccgcacttcttcgaggctacattttcaaccggtggagtgccgttccgtcgaagacaaacgatccgacagggattacacaaggtacccacgccaaccaaggagtgtgattctcagggtttaaagctttgcggctgcgaatctctgggtctatcttcttgctgttgactctcaagtcgattctctgggtctacccctggggaacagtcttgggctgcgctatacgaacccccccccctgggcgacaaaggtttcatcggcctcgcctcaaatgctcacgaagatgatggccttcctggagtccaactcaatgttgaacgagactatgaggatttggttctcagcggtctgctcgctcagcttctatggaatgtgtcgtatcaacgaagttctgctcatgaagaaaggcgacatccagctcggactgcaacgttaatcccgtgcaaacggcacagagatccgcttcggctgcattaccattcgtggccgaaagacagaccacgacccactcgccagtcggacgtattcgctgcaccatctgccgaaagaggaacgcgctgccgaggcgttgacgtacctggagaggtggttcgcatacgcgcggacaaaactacaccattcatggtgcgatagtgactgtgctttcccatcgctgacgaagatcccacgtggctgcagtaaaaaacgaaagcccggtgcgaccgcttctaccaagactacctcctttgcaaacgtctgtgtaaaatggggatcgccgatgtccgacaccaatttcacgcaggtgctgaacatcgttgctgaggcggctgggatcagccggaatttgctcggcgacgaaatctggttcacatcgcactgtttccggcgcgggggtgcccagtacaggttcatgtttgcaccagagaagcgccgatggtcgttgaagcttgtaaagtggtgggcgggctgggcgcccagtgagaaagctgagacagttacgaggtatcttttggacgatgtcctcgatcgcgaagaaaaccaacttggtgactcgttggtgcccgacgcggtgtcatgctcttccgcatcgcttgaaagtatcagggatattgagtacggaagctcgcaggcagagacagacgattgcgaggaaatacaggtagtgcaatgagcgatggttctgcggacgtttcacttcgcgcagttgatgagctgaagacgttggttcaagggttgcgtgacatggtccagaacatcgccagtagccaaagcttggcgcaagacacggtacatggtcatgaggagcaggcgacacccggtacagcttccgatgagccgatagacacgttgagcttagtctccgagctgcctgacgcaaactcgtgccgtgactacgtcaaccagtattggaaggccaacccagcgtgccatcagaaccgagcatgcttccacatgagcggaaggtacaccgctcgcggttatcgcggatgaagattatcgctgagtatatccgagacgaattcaacggcgatgagaacctgtttgaagaagcattcaagaggtgcgtgcacggggagctgacggtgaacaagattctagcagctattcgtaaccgatggcggtagtagtataggtcgtcctcatttgtactgtcgtcctcatttgtactatcgtcctcatttgtactatcgtcctcatttatactgtcgtcctcaattgtactgtcgtcctcaattgtactatttgaaccagtacactttcaaccatacgaaaatgtcatatccaattgtgtatttgttatgcacttatgaatctgatcctcttcagcttcctagtcatcgcctgagtggtaatcatcgtcggagtcatccaactcgctgttgaagtcgcttgggtggtactcctctgagctgctggcagttctttccactgcgtcggaagccgattcctccgattcgtatgacccatcgtattcgaatgcttggtctggttggtggtcgtcgccttcactgtcgctgtcgaataggttaacaggaaacgggaacttgcactcaggacagaggagatctctgtgcctagtcaggcccaaatacgtcctgttgtaggatatcagacattcgtagtccagtttgtggtcgcactgcgacccctccagtacgataccagtgatggcattgttgcagacgaagcacgttggaggggcgggaacatgcttcaccaccactacctcatcctcatcaacatcaatttgcaccgcagcgcggcagttggcgcatcttgggtcatgctgaagacttttcagcacgcagtgtcggtggataggctggcggcaactttcgcacacccagatggccttctcaccttcacccccgtatcttggccgcgaagggggcatatacatatcaggcaatcagtcacaccatcacgcggctgcacagtgttcgccacaatgtcgttaccactgcactcttgcccaaccgcagctgtcgaggtcgacaattccaattcgacatccaaaactggtgaggcattggttgccagctcctcgaactcgaaattggcccagtcgagtaggctctccatggtctcgtcttggccatccacagatggagaagcgtttacgctgtcagggggtgcaatagcgtaatcacgaccttcaacatcatcgtcgctctctagcagctggtcgaaatgcgcagattcgtccgcttgcacatcagttgagacgtgatccacacggcgcgaatcttgattacgccgccggcggtgccatgcggcgtcccgctctcgccgtgcatgcgccacgcggtcgagatgctcgacgagctccgtgagcgttcggcaccgtttggatgcctggtgccgagcaaagtggtggcggttgccctatatccactgccagtacttctggcagagctcgcgaggcaagcttgggagacctcggcaacgcttaagcaggtggcgctgcagattatcggaccaaagtcgtacaggcagggttcgcagttgtagccattctaatatcggaaagataagatcaattaaaaattacgtcaatcaaattgtgatggaataaatttcatgggaccaaacctacgttgtcgcacgtgcgctgtgagcttgtcgcacgagtagagcagagggcttcgcggtagttttgataatgagtgccatagttgacagttgagccgcaggtgtcggatgccgctggtgcgattgtatccattacagggcgaaaaatgactttacccttaccctaaatctgaatctacaggatactgggcactgttcgttggggaacaggttctgattcggcgtcatcaaatatacctagccctactcaaaatcgcacagctccaacgaagtcctactaaaataacgctaaataacattttatttcagccaatcatatgcgagatcagccaaaaataatattgaccactaagcatcgaggaatcctgaatgggaattccggctctcagtcgtagaaattggtcggaaatggagggcggtgacggtccaccgaagtgcaagtgccctacgttccctaagctcgtgtagaagtcgaacatggccaagcaccgcaaagtgtgcgggaagaagaagcctccgaagtcgcgcacggctataaaccgcgattcctacgcgaagaacaaggacaaaatcccccagaagctacaggaaaagcgcgtgtacgaccaattccgccacctggaaggtgcataattgttagaatgatatcaattattggtaaatctaacatgcggaatatgttgtggctcgtaagcagattactgagcgcgaggctcagggcgtggatgttgaggaaatggagaaaacagcttgaacgccattacccaaagcaaaggacgccgaggatctgctctatggtgtcagtttggatccggacctatttgcccatttcctcgcggagctgaaggcacgttgcaaggcacagcacggccgcggtccatcgatggtttctcctagagagctctaccgggtggcgattttcgttcttcaccccgacaagcttcgcggccaaatcagcaaatttggagaggagactgataagttgatgaactactggagaacgacggctaaggctttcaccgtgtttgggaatggacttacggcggacaccgagatgaggcttcaaatcgaacttgacgcagtgacggatgttgagtatatgaacgagcggcgccgcgtatccaacgcacgtaaagcaaaacctcgtgctgagtacgactatgagacgttggtgaccaacttccgtgccaatcgcaagaaggtggagcggtacttgagagcgaaagatcaccatcttgctgaattgcatgctggaaaggagaaggccaaagccgcacacacagcccaagtgaccaagttgaaagcaggtatcgcgaaactcgagcgggttgggccatgtgctaccttccaggagtacaaagcgtccttcatcaaggccaagcacgcagctagtacgagtgacaagtagtggggcgtgctatagaagccagacataagacagatgaactctacgagtttttcatctctgtaggctgcttaaatgtaccacacgttcataccaaaacgtacgagttcataccaaaaggttcgagttcataccaaagagtacgaagtgttcatactaaagagtacgagttcatacaactatctacgagttcgtactggttagtacgtgattagagttataggtacgtagagtattccggcaactcttttgcgggcacgctgcgtttgtgcgaagcttgcggtctttcctgacaaatgtagccagcttcgaaatcgtaaacgtatgctcagtggccgattcttccgctccgctatagtgctgggcgtagtagctgcgaaatacaggaagtacggccctctcccagcgcattttatcggactcgcccgtcagtttagcgaacacggcgacatcatcaccgagcaattaggcagcgctgaaccagctgcgcgctacaccagcattgattctctcggcttgcgtccattctgaaagaggcttgaacaagtgcaccgaggtgtccggaaaccaccacatcaggcataggtgactccagtctctagccgctggaaccgcaggactgagcgcttgcctattcgaggcggcacctggaggtatatctttgcgtgcagtcgcttgtgacagactgggcaaggtcccagacgtaaccaaacctttcagctggctaatctgagatttagcctcgagcattagtgtctctagttgccgaatgcccttgaaaacgggcccttcttcgatgtttctgctagcctcataaggagcgcttggacaaccgtgcagataactcttgtccggtccaaacagtctgcgagttcactgtcctcggtttgaacagtcagatccagaaggtagcgcaccagcgtctccgtcgattccgaaacactccagccggcccaccacttgatcatccgtaacgaccagcgccgtgctggttttgcgtacataaagcggtattgagcccctcctcggcgaaatgtgtgtgacgtgaaccaactgttgtaccaatgcttcgcaacgtaacccggtgtcgattgtccctttcggttcagcgtacccacgatgcagttgagtagcgtgataaaactctgttctcctattttcttaccccacccaatgaccactttttcgcagccggtggtatcgtcgtcgcttctaagagctttcttacggagaccagtacgagcagggaatacgtagtcttcatcgctccatacgtgggctttcgtcttcgtagcaaagtccacccaattgcagaggtgcttttaggcattgatcggggtttattcgtccgcgagatggtgaagattataggattgccagcgcaaccccaaaataatcccatgcaaaaatatttcagccaatcaaaaccgaatatgcgaaaatataatatcagccagtaagcacacgataattggtcgctgcaccaaaaaccgaaatggccagggctccgcacggcagcgcggcgaagaagctgtgcgagaagtgtggcaatggaatatcgcgcacgaattctccaagcacgcagtgaaatgcaagggaattaaagtgcgcgacaaccggcgcgagattcgggagcgctcatgggtcaagcaccgcgccaagcgcgtaggagaccagcgcagccggcgcgcgtccgaggcatttcaacgacttgaaggtaccgtaaggttctttagtttgatatggaggacccaagcttaccattgtatacgaagcgcttcggcagcagctccgcgaggtggagagggtgcctctccctcttaaacctgagccagtggggctaattaagcaccccctcgaggaattaagccgcaatgcggattttgttcgagtacattttctcccaagtacgcaacagaaattgtccatagtgatgtattggtactgacacgagtttatttagatggagaccgtcggcttgctgtcaaaggcatggtttaacccaccggcgaccgctcttatcccgattttgcagggataagatacatctagaaatttgtatacttgtggggtagggtaagcaaggccccagcggccggcaccgaccctttgggttccattaggtttcaatctcattggtcagagttatccaatcaaatgccggctatgtgagtaatactgagctggttcaagactcaactggaaaaaaccttggcctattttttcctaaaattcgagatatctccatctgtagagaatccaaaccagaatgttgtgatacgtgagcagagtacttaatatactcacatttggtatcatcgtatttttttctgatcgggatgaccctgtgtggcagcggcggggacagttcctcgcgagcttgcggacgctgaggcagcaagcctgcctgtcgtgatagtctgtcagcgtgggagagataatacccagaatcctggtcaataagcaatccgttcagtatctagagtgttattgtatcctgcgggtgaagccgtggccgtacaagaccgttcgaatatgaggaagacgtactgcatgtgaggaagtcactgagtccgtgatgcggcttgttatatggtgtacatcgattcacctctgtcattcctgcacagcgcgttgattcatgcttccgctgctcgatggcaggctactgtaactcttgatgttgccagcacgatatcgtgctcgcttgggtagctccacgccaaatgcaagtttgacgccttccaaattcgtagctccaacgtaaggagatggatgcgttggaggcgggtagacgagctagagagcgccactttcatgctgaagtggacttcaaaacatgccgaaccgaaggtaacacactatcaaaagcttggactagtttactactcggtctctctgttccctgcgagacctacgtgacgacaagaacatcaatggtgctccggtgatatggctactctgccgaatgagcgtgaatctgtggatttcagtgtgatatcacgaagcaatggtgattgttgccacgtggctatgcgtattgaattttgtatggccaaccacgacaacgtggcttcgcgggctcgtcaacactgacatgtttgtatagttcttagtatagaggtgtcatggttgattcagagatctcgacattgacatgcttatctagattttagtatatcatatcgttattgactttgataagtcaatattgagatttttttttactaggtttcagtatatcaagcaaacggtttgatatattgctccgttaatcgaatataagctaaaactagcatagactccggtcgttcgccgatctacgaggctcactggaagctacgacaggctgtccatgtggggcgcgggcatactgtcagtgtcgaagttgtcgatcgccacgaacgtcgtatcgggattggcggggactgcaagtgtactgtccaagtcgatgtagtagaggatcggcatgcagcccgagtcgggctgatcggtggccgcgtgcatgagatccgctccgggccggactggtccgtgaggatgcagtccattccgggcttgatcaaagccgtggacgggcagtccgtattgggggtgctttgggtctgcgggcatggggtccgtgtcgagcagatcggggaccgcgggtctgccatccgtgccgtgatggtctgggtcgctgctacaacctgcatcgtttggacgatagcgagaaccccatggacgcattgacgcatttgacagcatggctttcctacgtgcaagggaagactgatcatagctggagcgacggtgactacgtctttccggcgctgtcaaaagtggctaaaagtgtgctgaagtccgacactgcatccaccggttgtgaaaatgcgcgtgtaaaatggggcaagaagatgtctgagcaggcattcatcacccttctcaactgcgttgtgcgagatatgaatcgaaacgggaaatcgacgcgtggctacgtcaagcaggagtggcgtgatatctggttcacatctcacacgtttcgtcgagctggggcgcaatacaggttcccgtttgctgttcccgagcgtgggtggtcactgcgcatggtgaagtggtgggcaggatggacctcaaatgagtcggccgagacgtttgtgcgctatctactggaccaagcggctaatgacgaagacaaacaattagcggactgcttagcgccggatcgcgaagcgcactcctaccacgtactcaggtcggaagcgtaacctaacaatttctgtccggcagcccccattggccggtgccgtcgaaaagcggctgaaaattgttgagaactccgtcaaaacgctccacgacaagattgacttgtctggcatccgtcttgcaaccgtctcagcagtcagtaccacttccagcaagtgccaatagcagcgaaagtcacgtggagcaggtgtcgatcctcccaccagccaaggactggaaagacatgtaccgacttctggttctccaaagagtacgtctgcgaccgcaactgattctctgcagcagcctgcactgactcagcagagtgcagccgggcgctcatagttgccatctccagcgtcgagccatcgccaacatccatgttcggctccgcagcagtaaccacttcatcgaggttccgggccgacgccaggcgagaacccacgcggcgatcaccgcggatgctcgggcccagatgcaggttcaccgagagacggccgagagactccaacttcgagcccagcaccgccaatatgcgctccgacgactcatcacatgcatcacggaccagctgctcaagggcgtcgcgacgcataacttgaccacggccgcgtgagttgtcgagagcaggctgagaagaaccaggagacccagggcgagatgttgccggggttcccgaagactcgtggccccgcacagcctcgataagcggcagcggaggcacgccaccagccgacagcagatataagtagacgcatcaacgagaacaacatcagcatgagtgaaaagaagggggacgcatgcagcgacgggatacgcacctgcgcggcatcgtctggacgcggagtatcgtcagccatcgacccagcgcgagccgaagacgacgaccgagcaggcgaagacgcagcagaaacctggccggagaggctgtcaccagaactcgacgcggcatgaacctgccgccagcagaacaagcgaacgcgcgtgagggtaagcagtcgccggcacgagcagaagaccagacgcagcacctaccatgtcagcgggatcgacgccgagcgctcggaacgcgcgggccagcgcagccttcgcggcgacccagccgtggtagcgcgaagacaccgggagcaccctgacgctcaccaagtgctgtggctcgcaacacggtgtgggcagctctgatgtcgggagagttgagtgaagctcacggcaaggcctgcggcgtttggcatcaattcaattggcggatcgaggcacatcgccagtcgttcgatggtgttcgacggccgctgattggtctgtgtcgacacaacaccgggacttcaaggacgacccgaacctacggcgaactttggcatgagttccgcacctaaggcgactcttcgagtcatcgggaggccgtccgagccttcaagagagcttggaagagtcgggtggttacctggaagatccaaaacggacacgtctagactagatatttgtattgaaccataggaaagagaagatagaacagataagcgctttgggcaacaagaacataacagcttttcctcccaaccactcaaggaagacgtccgggctatcggtgagttcccgtagcaattggataaatctgttggtaggattatgactgtcgctggacgcgcctgctagtatcgtagcgtgcgtttacccgtggtcaggccaagagaagagaagaagtggccgtgtatacgaagggcgagtcatcgccgtgtagtggaggagcgagagcgcactccatttatccttcccgtcggagtatagctctggcaccctcgtatcaagccgtgactggctgggacccttccttcctgagggcctgcgaggtttatattatgtgtgagagcgtgccagcctttgctcgtggctggtgacgctggggtttccgtcagttgactaagcggaaacacggtgcacagaggaaacatcaacccggtggaagggaaagttcctgggccttcatgttctaaccctaacaagcccatttagtcatcgggacttggtgggtgttgttggtggagaaagtgtgctattatataatttagtgcgtgttcctacacgacaacaatgataggtgggtaccacaaccaatcactgattgccacatcagtactgtatacttcacaaaagcacacagcagcaacactatcaaatcgcatgctggcacaccagttactggagcgagcacaacaaccaatcacggcacagacgaaaatcttttcaacgaatcatcagtacgaaaaaaaacgttttacccaatcactcacaaacgttccccatgagatggcagcaagtagggcgtcctgatcaaccgccacacttcccaagaagccccatagcgagcaagtcgccctgtcctccccctctgacccaccaagcatgacccaagcaccctcctggcgcaatatttgcatcaagaagtaggagagcatcgatctccttcttctcgggtgcatgaaaaccttcaaggcatcaaaaagccaaaccatgttctgcacgctctgctcgtggccgacgccgcatctaatgcgctacaagcttctcacctgtcgctgcacgcagtgcaagacggcggctccctacgctgcatgtccctggatgtaacggggttacacgcacaagtggctacagtcacttgttactctaacagatgcgatgtctgttagaggtttgaacacttcctcgaccttggtgtaaggtacaccaatggctacatacatttacgaccaggtccatacacatttaggattcctatcggctgaaagcagcatcttttagccaatgagcgacatgtatagcattggaattctgccaaccagccgttggcagattcctagtttagaatattacatctagagtaagtcagaaacataaaacaaaaatagcagttctcatcttttaccaaaacacgctacttggagtctttatcttgtttaaagtatacttgtggatctcgagtatacttaactcaagtaaaagaaacctacgattcctcatacacgtgcgcatacgtgtaagccgtagtagtgagccaaggtaggcccactacacctggtagcactttgtagtccgtccaacgaccggactacctgaacgttcgtgcggagctgtacgaacgatgagccgagaaccttttcatgagcgcggaggtgcccatggaagctccacttcgccagcaactcatattgcccgcgctaactgcctccacctgtcagatccagagtgagaggcactccaacgactgcaacagtcattggagaagcggctgtagctgtaatgctgcgaacactatcgccgacggagcaacacggtgttgctctgggattcatcatgaaggagcagcgtgatgctgcttcctctaccacggtggcgtcggagacgacaccgcgtggacaatcgttgaagctaaacgtgagcaactatgtcggaagagagggcgagcctctcctccgttggcttgtcgaactcgacactgccatcgcggctcgacgtatcgtcgacccgttgtccaaggttgcgttcgccatgtcatgccttggcggacgagcgagaagttgggcgtatggacgccgactctctgatcctacgtgcttcagcacgtacgagggtttcaaggaggagctcaggcacccccgcaaaatgagtttcggtcaagggcagagttcctcgacctacagcagggtaagcatgatgtccatgcttacgcgcagagagcacggtacttggtctcgaacattgtgatcaacccgatagacgaggcgaccaaggtcgtcacattcatgaagggtctgagagatgggtctgtaaagacctatctcttccgtgagtacccaggtactctcgaagctgcgattactcttgcaatacaggaggagtttagtctgaggcaggctaaactacatgcgaatgcaccgaggctgcaaccgcctccggtcgcgatagcgggaggtccggaaccaatggacctctcgaatgcaacggctgttggttatcaacagcaacaaggaagtaatgtacgatgcttccgttgcggaaggatcggtcactatgcccgagagtgcacggcacccgtgcaccgagatggtggtcgacgctgcgatgccgggcatcgtcgcggacaaacaaaaaacgctggaacccagtaggcgcggggcgcgccctagttccgtgtgttgaccttgtacacgcgacactgaggactgcagcccccagtgaggttcattctcactgcaagaagcaagatgacaggcctgaccttgtcatcctgaatgtgaactcgatgagagcaagcggctctctccgtgctttggtagattttggcgcgtcgaagaactttgtttgactgcgacgtctatcaaggcttgacttcgaggatttaaagatacctcgaagtatgttggaagtacgactggcaacgggtgccgtcgtgaagacagagacgcgcatggtacgtgtgcgcttcacgtatgaagatcaagagtttgtcgagacctttatcgtcctggatctggacgataagtttgacattgtattgggcatgccgtggcttgcacgacatgatccggtcatcgattgggagaagcgcactctcgcgcgcttcggtcgcgacagcggaacagtgagcgatggccctgttgccgctacgcacgcaccgacaggtgcgcgcgactccccactcgagacagcgcttaatgctgctgtcccggagcgccctgggctcgcgcgagcacgcgcgcaagagcagctagcgtcggcgttggcgccgactgctaatgaaggaaatgtgttgacctcggaggtcgacacccgcttttcagcgaatcaggaagagtctccggcctcaaggggcacggatgacgcaggcgagtcacacgcctcagccgtggaggctgacgcgaatctgattggatcagggctggccaataataagagccaaggtgacgtaacgccgtcgactccgggagtcgatagcttgggtgaatttgatttgtcggctcggggagccgacgcatcctccgtaatggagggctccgccaataacaggcgtcgagctgatgatggcgtgtcggctccgggtcttgacgcgtacctgtgccgggttccggtacagggagatgaccctcgctaaccctccgacacaagcatcggagttgacttcgcttccagtcatgagctggaagcgcttcgcgcgtgacttgcacgatggacgcatcgagcaaatatgcattctctcgggcgccgagagaacgaagagcgagaatgaagaactgaggcagttctttatggagaccaccactgagagtgaggccactctcagtgcgaagactaagaaggagcgctatgaggagcagagctgggactcgctgaagtcgagtccctactacgagatcttacgggagtacgcggacgtacttctggaggagatccctgcggagcttccgcaggataagggcatccagcacaagattgatctcgtgccggggacgaagtactgtgtcaagcggcagtggccggaagctgcttgcgctcatgcgcaagcacaagctctatgcgaacctgaagaagtgcatcttcgggtcgagcgagatacccgtgctcgggtgtctcgttgggaagaacggtgtccgccctgaccctgagaaggttagagtgatcaatgagtggccaacgccgtcgaacgtcaaggaactacggcagttccttggcttggccacgtacttgtgcaagtacgtgaaggactacgcgggcatgatacgcccgctgtcacagctcctgaagaaggacgccgagtgggtttggactgctgagtgtcagcaggccttcgatgcagtcaagcggggcttgactgaggcgccaatcttggcggtggccgaccaagatcgcccattccacgttgtgcgtgacgcatccgacttcgcaatcggatgtgcgttgatgcagcacgatcacgagggtcgtgatcgtgtcgtctactaccaatcgcgccagctgaagccagctgagcgcaacttcccggtacatgacaaggagctccttgccatgaagtacgcattcgcgaagttccgagtgtatctactcggaagcaaaccgttcgtggtctacacaaaccacgcgtcgctgcggacggctgtgaagtcgccgcacatctcgcaacggatggcgagatggctctcattcttcgcagagtataacttccgggttgagtacaaacccggaagactcgatgtggtggccgacgcgctttcgcgtcgacctgactacgccacgactgatgccgacgtcaataccattgacgccatgtaatcgagcaccccaacgtcgtcacggatggacgacgtgaaactcgcgtacgcgcacgacgcggacgcgaagctcttgctggcctacggctcagcgccttctgataaagctcgtcagaagctaccgaagcatcttcgtgctcgtgcacaccgttatcgggtgcaccacgggttattactctacagtgcagtcgacgacaacgcggaccgcgttgtcgtacccaatgaccatgacctgcgactcagaatcatgtacgagtatcacgatgcaccgactgcggggcatccgggccgtgagaagacataccatcttctcacgcgagacttctactgggcccaccagtataaatgggtgcgcaagtacgtccgtgcttgcgaggtttgtcaacgtgtgaagcctgcgccatccgcgcaggctcccttgcagtcactgccgactccgtcggagtgttggcagtccatgtctttggacttcgtgttcggtcttcccccgaacagccaggggaacacaggcgttgtgggctttgttgaccgcttcagcaagatggtacatcttgctgcggtacctgctgaagtgactgcgaaacagacggcacgtctgttcgttgacatggtgttcaaacaccatggcatgcctatcgacattgtgtcggatcgagacccgcgcttcactgcacacctttgacaagaagtgtttacacttcttgggagtcaactttcgatgtcgactgcggaccatccgcagacggacgggcagaccgagcgcgagaaccgcgtgctcgtagacgtgcttaagagctacgctcactcgttccaacactggagcgagtgtctgccgatggcggagttcgccatcaacaactcggtgcatgcctcgaccgggcatacaccgttctacgtgaatgccatcaggcacccacgcctcccgagtctcctcgggatggtgattccttccttaagtgggggaggatctacgactgcaacgcagcagccgcagaatgccgctgacacttgcacagtgtcagccgcgactacgcgcaagaagaagaagaaggtcgcgtctgtgcagggcacagacactgacaagagcaagaagaagaagaagaacgtatctgtgtagggcacagacaccacgaagacgaacgcagaggccgggcctactgctggaaacgagctgaacgagttcggctcggacgcaatcaacttcgtgcagcgcagacaagccgtcattcggtttgtccaagacgctattgcagcttctgtcgaccaacagaagctgaacgcagacaatgttggcaggggcaacactaatgaattcgagaagggttcattggttttgttagcaactcaaaacctgcctaaacgtgcagtttccgacttcggggcaagcaagctcgctccgcgcttcatcgggccgttcacggtgttggcacggcatggcaacgcctacacgctagatattccatctagcatgcgcctccatccgaccttttacgtcggacggctgaagccatacctgcagcacgagctacgtagctcggctgaaccgaagcagaagactcggcggatgccatcatcctctccagcgcgaagtcgcgctggagcagcgggtcgagctaatggtccagctcggccggaacgatcgaggcggcctgggaggccgccgcaaactgcgaatacttcagagcgccgaacccagcgctctggaactaccccacgaccggaactcggtcgtggggagatgcgagatcagggtcaacaccaagttgaccacacacggggcgtgtttccgccaccaccgccgccgattcgtgatgcacacggctcaactcgatggattgttgagcggattgttgatcacagtatcccgagaacgaacaggcaaccagttcgttttcgtattcgttggagaggatttcttcccaaccaagatacatgggagccacggaacagcttgctccaagacgttccagacttggtgagggcatacgaagcccaccatgcgctccatactggaacgtaatgcgagcgctgctgttaacagcagcgcccgaagacacttcgagggcagacataggtacctgcccccgcggcagcgacgcgcttcgcacgttgccgcgcattctactcaacagcagagaggttctccgctgctgcgccagcggtcttcaacttcgacgcgctcgttccattacgagcgcgctctcttcaacgtcacgcattgaccaagtggtcaatagtggttgacgtgccgggaccggcacgtctaaccttgacggggcgatggtgtaacggggttacacgcacaagtggctacagtcacttgttactctaacagatgcgatgtctgttagaggtttgaacacttcctcgaccttggtgtaaggtacaccaatggctacatacatttacgaccaccacgacgggtggtccatacacatttaggattcctattggctgaaagcagcatcttttagccaatgagcgacatgtatagcattggaattctgccaaccagccgttggcagattcctagtttagaatattacatctagagtaagtcagaaacataaaacaaaaatagcagttctcatcttttaccaaaacacgctacttggagtctttatcttgtttaaagtatacttgtggatctcgagtatacttaactcaagtaaaagaaacctacgattcctcatacacgtgcgcatacgtgtaagccgtagtagtgagccaaggtaggcccactacactggagaggcaggatgctggtgtgcctcgaccgtattatggtgacgctctttgaggctggcatgcacgttacgagcgcgaagtctcctcgcacccccagcctcaccgcagcccaaaaggaattcgcgaggcagatggcacaagcgggcatgaagctggctcgcatccggactgcgatgctgccgcagttctcgctacagcagagcaagcttccggccctctagaaggtgcagaacttcgtctgttactactgccacacgaatctttgcggtaacgacaccagcgccaatattcctgcagcaatttgcgctcgggcttttagcggaacggaggatgagcttaagccgttttcgtttgggtgcgacatcgacgccaagggcgagctaacgttctttcggaccctcggacggcgagtcactactccaatcaactaacgagtcgtacccagggtactgacgtcaatcgcgcacgacttccaaatgtactgagaggaaataaccaatatcaatagcctaccacacaataaactttcggcctagtccccggcggcgctactcactcaacccgggatgtaatcaataatatgaaatgcaggacctcgctctgggcatgaatacagctgcaactaggaaatgaaataggcgaatcaccctgagatgcctgtacccctcagtaaccttacctaacttgggcgtacatacttcagggagagatccaaccacggtcgtacctagccccggtgcccggtcgtcctgcgcttcctgctcttcttggcgggttgcgggtttcaggggaaaacgaactctgtttatcttttacgctgtggttatcttcctgcaacttagacatgtattctgtttttcacttgacttcactataccgcagttgacgtcgacaccccggtcaaaccaaaagtccagcgtagaatcgtgggtacaaatcacctccttcaatgttccatggaatccttgcccatccttggtctgcctgatcggtcggaaaatcttgacttgagtatactttgatcgtatctcctagacttacacccggccagagtcgcaagacgagttagcgagtcggacagatcgctggtcgatatgcatcctgggcgagtcttcgccgggtcccagatccttgcacttgtcccgcaatccacgtcatccaatcatccaatttcagccaatcacactgtgcccagatgaaaatccaattttccatcgtgtcaaccgcccctctggtctcgcttggtcaccgagaccatttgccggattgatcaagcttgactagaccacacgatctgatgtctgggcggggtgttgacaacacttttgattcgcccggacttccaacggtcgcgtcccttctgtgctccctttcctagtcgaatctatctcagccacgagtggggtcatcactcattcgctcgggcttgcaacgacttctccgttcacaaagcaatttgccacctcgccgacacccgatgtccacgaacgcttccgacgccgacctgcttgccgacgctgcgctactcccgcttgagtcgttgcgcatcctggatggcgcggctggcggcaactcgaaagtcgcctcgaagaacgacaacaaggggtcctctccaacgcaagtggtgacgaggccatggacaccggcgacgagcgtgacgacaacgatgcggaccacgacggtgacgcaggcgaacatggtgatgcgaaagaggaggctaaggatgacagcgccgacatggaagtggtcgatgacacggccggaatctccacatccagccagagcatcggcaccatatctgggtggacgcattcaggcgaacagaccccagtattactcggcggtggactttgagggaaaggtgtatccattccccttccgtgacccgactggggctcttgcgtagctcgtacatgcataatagtctgcatgtccgctgtgcgatgcgtccgctcactggtatgacgaacagcttgccatacgacgtatcgaaagcgctgagagcgtgcacatacatttggaacgcatgcatgaactctgcaccagccttcatcgtgctaccggagtatcggggcgctgccggcagggtcggcgcattcgtcacgcgcagcgatagcctctcctcgtggacgtcatcacggcttggcgacgccgtagccatagacacgctgtccgcgcccgtgtactccattccaccggtcgacgtcggcggaggcatggcgaatggtcccgtccacatcaggcggcgctgcccaatgccccacctcgggttaccgcccggtgcggacctcgggtggcacggggacggacaccggaagtggtggcacgtcgatctcgagctcctccccgcggtttcttgtcatcgtcctttgaagctggagttcgattcaccgacaaatttatttgttctcgctcgcggtcccggctggacccgagcggccttgcgcacgtgaaggtaaaaaccaaactgacatgtattgaaagagtcttagcttgttggtgctgcttcctactgcatccattggttgccccttctacatccattgcacctagctatgcgatctacctccagcttccaatcggtgccttctgcaacttgtgagtccctcccacccaccttcagcccacttactcccagaactggccgtacaccttgcacccttcgagtgcaactcatcgagagttcagatgcggctggttgaaggctgtgtcgtagccgctgtgccgcagatcacaagggccataagccgtgcggacgccatagtataagtagatagcagcggctgaagctacccgtacgatcatgccaaagagtgactgcttatcgaaagcgttaggaactgatgcagcatgtttcgactcagtgccgattcagcagagcgcaagtattggtttgcgaaaattatcgttcacatttttgggttttgttagaatgttgaatacataactcaggaaagaaagtggagcgattcctgtaggttttagaatccaacaatcggcttaaaagtgcgaaggaagggcatttctgaattggttcttgcaatctgaaccctacgggaatcgctccagtatagcagacaaaaatgtttgaagactggacttcacagccggaatttcagagcttcttcgtgcacagcacgactttgtgtcatactccaagaggtgggaatataccaattcctgaaatcataagccaatccgcctacgttttggtgaaaaatgccatatgcagcttacgtacataggaaaatgtaccatgtactgtaaaccttttatatcatgtatacaaatgtatctgacacacaatatgcaccttaccctgcgcgttcttactgagtatgtgcgcgggccggtgcgcctaaatcatcgccactgtaacctagtgaatgcgtttcgatgttcaacatctacgtgctcctcaaagactacctgccctaatgctagaaagagaagaaaaaattgtccctgttgggttaccttatttgtgcccgctaccgttaaatacgccgaactgatgcatgtttgcattaccgcatcgcccctgtcccatggcttaaatgaagttttgaaaaaggaagtcggtaaaccggtttatccgcttctacagtttcaatcttgtcggtatgaactcagtataccggtgatctctgttccctccctttaagtacgaaaaggggaagcgtgacgaaggagaacggaggataaccgacaacctttcagtaaaacccgcggtctctctgtttgaagagctgctataattgggtggtcctccagcaaaagccgcgaacctaactcgaacgtatgcaccgtttcgtctcgccctcgatcaaccaaccagaggactaagacaggaactttaagttcagatctcctgtgtaggttaaatcttccttcacttcctcccgttaaagttcggccccaaacgaattctaaaacctcacgagcagctgtttgtaaggttttagagtccacccgtttcatcgggaacatcacttcctcttctcatcattctagccataccctgagttttgtcctaagcgaatttatgtattgagcgatcaaagagccatattttcggcatatgtttgatgctaaactgctgtgccaaacacgcgaatcatagacggatggcaagcgtattgaccgaaaggcatgtcatgcttcgcatcaacgcaccagaagatatacaaatataccgggaagctcgagcacgaggtaaatggctataaccgcacgatatatgcagacggacgcgtcaccgagcacatatttttaagtcagatgatttaccctatttactaaattctagaatcaaatcattttgtcatgaagataaccctaactactagaacgcacattgaggttcgctaagaaaatatgaaaagcaccacccaatccgtgaaaaccacaatggacttgtaacgagcacatgtacacgagtcaggccaaaacgtgaggcacgtcgtgacatgtcagccaacgaccagtcgcgctgtggcacaggtagaccatatctacaatcttcctgacttctcatgcgccgcacgtgctcacgcgcagcatgcagaacggcagcagttcttcttgctgcgacaggcgctgtgaggaccaccagcggctagcgggcgtcaacagctcggagcgcatacctttccagcttctaacgcaccaatattgatggagatctaacccgaaagtgcagccggcaggctgcccgtctaattgcaggtgggaaaatcgcgcggagcgagccgctaaatgatgcgatggagggaagttcgtgcgggacgaaggtagtgcataaggtggcgagtgggtgggtgggtgagtggatgggcttggccgcgcgctgtgttgcagcgggacgatgatcagtgtatgcgccggcatcgcatcgagttcatcgcgcggggcgagccgcggaaggatgcggtggagggcagttcgtgcgggacgaaggtggtgcaggaaagggcgagtgggtgatcagccccaagggaacagcgatgcaagttagtgggagcaatgcgagggccatgttatggtatatacgtacatattaacccctccaaaccggagccccaaaagtgtttgatatgcagtatgcagcataattagtcttgacgtttgtatataagggatcgggttggcggcaagcgaaaggctgagcttagcaaaagtgtgtagaacggtgctaaaactgctgtatactgcatgttgtttgccaacgccacacagctaagctgcattatacgggttaccaaggaaatggacagggcactactacgtgcccagcggcactgcaccttgtcctcattttctaaaatttcgaaaatcaaacttcccatacaatgaatcatatacaggttggggtgtcacccctagctggtaacgcgatcatactttgctggtaaggcagtcaaaggaaacgccacggcgcgtttttttgttgtaaacaaatatctaatgaagtaagcatccagcatcaacagctgcttgaacacgcgtctagcagtggctcgatgctcataacatggggttgtaggatgcaggtcaagatcaacctgcccgaacatgatgccggttgagatggacgtgcgcgaaaacaggcgattgacgctgcactacagtggtaaacagagtgcttactgaacaaacaacacgcatgcaatcagcgttatcctgcattatacagcctagcatcaggataatatgcagcttaatcacaacgggaacgtgcgacaacgtttgcttgacgcagagatccgtggagtgtcaggcaaagctctaccgtcgttgtcctcgtatggtgttgccttcaataagtttttcatgtaggcatcactcgggcgacgtctcagcaggtcgtagcagcatcccgtacatggttctgggccttcatgaagggaaaatcggacgtcgtcagccgcacttgtcatgcccgcccgcaacccgtcatgaacgcattagcaactttcacgttctggcacttggtactttgtcgtggtgaaaacacgagctgacatgctacccaaccaagacacgaccgggaatcctttcgcctaagaacgtatgctgtaggaactaagtcgactcacggaatgctaggataaataccattgtttttcattgtggatatacgctgttacttggtggttacctaaacggaatagctccgtttccgttgtcatcttgccaactaagatgtctttccgcctcgttgacactccgcgcagtacgcagatggatcttcatgtgattcctcaccaacacttcatcgttgtccccggacgtgtttaaacgttcttggcaaactcaacacagctgcggtccatcgtttcgtcatacggagcgcagcgaggctccatgtcttcagcgaagccaatcgcgctagtctccgtcgttgttgtctgctaacaacgtgcggatgatcccgctagtcttatcaacggcgcttgaacagcgtattcagggtaatattcagtataagatgcagcttacaacacagtatagtacatccatgcaacataacattcaacttacccgacttgctcagcgctgaaaccgcacttgaatcatgaccagttggttgcgtccgcagtagcaaaaactctcagtggcagccgcgtagctcgtccgactgacgtcggcggcggcagcgattcgagcaccactagctgcacaccgaaggtagacttaatccgagaagaaagccgtaacaaagtcgaaggatgggaaagggccgttgctggagtacaggttccgagtcgagaactgcacacagagcacataagcgcgtaagaggttttttagctagcataaaccaatgggttcatacgaattgcgtatacctcacccaacgattcatcgccacggacacgtttaccccgttggtgttgcttgcgtcacctccagaccgcaggtagaagtagtggtcgccgagcccgtgtccagacttgctccagcaggctatcaccagagcggttaagctcgatcttcccccgcacagcttctctgtcgatgtgtgctccgcgcgcgcaaatactcgaatgaggccggtgtttttaaaagcggcgagcggccaagtgctgaaccactcgtttggagtgtcccaaaagcctctagtatcatatgcaaatccgttgcagtacggtgaacctgccagattccatattttagatttagaccaagtgtatgtcctttcctattttgcaaaagaaaggcgcgaacagaaacccgacaatttttaaacttaaagtttgtataccctcgtgtcggaggaaaggacacccatacaaatttcaaggcaaaaatcgcttaaactgaatatattaagtttaagtggaaaggctatgctgcattatgcagcatcggggttggaggggttaatccagcgatgacattaggtagcgactaaagctgacgtctacatattgcttgagatacaaacgacagggcaactactctcgctcaagcgatggaccatcacgcggcggacgcccgactgtcgttggcgcgttaccgacagtagtgcgcttccgcttcgtcgtcacgcgtatgttgacgagggcttcggcccctttctcatcaattctagcgcgctcttacagcgcaaagaggacgtggatacaggtcgcgtacttgaagtggaagcggcatggacacgtttgcgctaccatgtcaactggccaaccaggttcaggttggttttgcttttcattcgtgccgtgttgaacccaaatgtgctgacccttgaatgtatgttcgtggaagaattgaagatgctgggcggtggcgtgtacaacacatggagcacgtcggatgctaagcccccgagcaagaactcgacgctcatgcgagggacgaattcgcgcagacgttgctgtaacttaaaggctcccactcgtgcacaagatctccttcgacggcttgggctttgtggcgaatggagccaagtcgacacctcgttgacggcagcacgcagcaagcttcgtcatgatctcgcatatcttcagtagtcgatgggtcgtgaagtcccgcttcaacgcccggttgaactgcttaaccgggttgttggtcgttacaaaatcgtacggagactggtagcactgccagcggcaaaagggctggttgaaccacacgtgcttgaaatatgcatcgaacggcttcagcagggggttatccttccagcgcttctgcgtttcagcgagtacgccagcatactcggtatcgtttcgaccgaagtgcatatcgtagacgccctaaagcacttcctcgctcaactccttcagcaaccccttcgttcgcacgaccaccttcgcgatgaggtggtagtagcacatgagatgcacgtagtcacagtctccaccgaacccagtgctgaccgcattatactggccaccgtcagcatcgcccataacgtacgctaccttaagcggctgttcgatccccatgctgtacacccagcgtaacgctgcaaaggccttcgcgtagtgctcctcgttttcttgagacgtaataaaaaacgcgagcagatgaaatctcctggcagcatcactgatgccacaaactaggacagggtagcccacttggatggttttgtaggtagcatccacatgaaaagtgaaacttgatgcatctcgcgcagcttgacgaagcagcgctttcgtgtagaaaccgaaaagaaaagacttttcatcggagccatatccgacccgtggagcggctccgtccggatgttgcctcgctgttccgggagactcacgatcttcaataaccgcgtggaccgtcgagacgacctgtcgtcttacgactcactgcgaaaccagctcacaggttttcgggtggagcttcatggccacacgccgtttccggagcagcagtcccactcgtatcagacccagtttgcccagggctcgtacggggcccctgcgtatgccgctccgatgtacgccgcgccgttttacgaccagcgtgcgtaccaggcgccttacggcgactcgaaggcgcgcttcaaggggctgcactcttctccacggaccacccaccgcttcctgaggagcagagggtcatggtacctgttaagacgacccacgtaaaacgtcgggtgagtcgccatcgacttgggcaagtatatggtgtacgccgcgccatgccggccgaggactgaggcgaggtgggcgaacgccttttccgcccaggtgtatagcgtggaatgtcggggagaacaagtctctcagaacttcccgggcgacaacaccagaagatgtccgcccaagatggcatccggctgaccagcacgagaggcagtcatgtcaccaaggccgacgccatgcgcaatctcgagggcgtacacgcggtcccggagaagacgaatctcctctgactcggggccccagcatacggtgcgtttcctcaggctcgtagccatggtcacgcaaggccactgccggccctccttgatcgtaatggacggatccactaccacgtaaaacgagccgtccgggagcggcaatacatggcaagcgccagctgctcgtgaaggggaggggttaccctgagtcggataactcgtgggagcccgttgagcagctccaggcagactgccgaaggctgttgcaatgtgagacgagaagcagcagcagcttcgcaagtagtccttggcttgttggccggtaccaggggcacggtagcagacgtagtcgcaccgcgcctacgcttttcacgagctttggctctcgcctcttgctttagctcgtccagcttcggccggagcatgcgcttgctcatgagttgagcgacctcgatgcggagctcgcgcaagtccaggataacggacagcgtgcggtcctcacggagttctttgaactcttggtcggtataccctttgcgctggacgtagcgccagaagaggtcttccacctcaccccaggacatgctcccattaagattgccccagtggaaaccccacagatgctggagtccacccttgccccccggcttcttgcgaagcgtggtgcactccttcagtgtgagcttgtgtggtgctggtatcacacaccgggcggctttgacgtcaccaagaagtgtggctccttctccatgagagcacgctcataggaacccatcgaggtgtatccgccgataagaccacaaggagccgagagcctctccaacaggtgcggcgcaccattgccaggctcgggtgggaagtagccctgcggatgcgtggtacccccgcctaacaaggaatcgatggcaggcgtggcagtcggctacctggcaaacgcgtccaagctagcagcgtgcaattgttgctgccgctcgtcaaggttgttggagagccgcttgggctcgtggacgacacctcccttgtcctccgactccgattcactgaacagcttggatctgaagccgcgaggcgacctggaggcggcgcgcttcttcgcactggtctcgttggccttcgcggcagcagcggccttcgatgcggcagccgccttagacgcttgggcacgctcaccaccttgtgccagcgtcagatgcatgggtgacggcaccgccttgggttcgaagcccgcgtcgttcagcgacttatcggcaacagattccgtgtcggccatgacgacgtcgcctttctccacctacttgctgtagccggcgccggctctagactcgacgtcctcggcctccgcgatgagcggagagctgggcgcgctgctcgccgcaagcgcttcggctttggcagcgttcttgctgccctcaggtgagatcccaccggaatgcacaaccagcgtgaagttctcgatactggccgtccagtcgaagcctggcttggcctgcaccgactggggctgacagctctcctcattacttggcacggcctcgggagtcttgctccgactccgagaccggcgcccatcctccggcgtgctgctacgagagcgcaccgcctcctcggccgcctccgtggcctccctcagcgcggacgactcgttcttggccttggccttcctggtcttcggcctctcggccctcggtttcgaaggggctttcgcagtgtgcgcactgcgctttggaggcatgcttccggtggatgtggagaccctgcggcttgctcgacgatgcgccaggtactatgtgaggcccgtgagccgtggcgccagagctcgcgccgttgtcgatagatttcgactttgcgagtgaaatgagatagcggctgacataatgttactaatccaccttttagagttatcgagataatcgccttcaaagttgggcgactgattttcgcacttaaatgaagttttgagaaacggaggattttgtgttttgaaaattcgaaccgtcactaaaccgaactgggacgcccacacaatcgactttgccaaccaccgtcaagatctctgccatgccgctaagccctactccttctagcactgcaggaggctcctccatcccgctgcagtcaccgtcgagctccctgacgttgacgctgcttgctcctagcgcggttgcaaccgctgcgacgcttgaagaacccattcagcttgctcaagacactgaacaagtccagcaaagtcgcagcggcgaaggcgatctggaaagcagcgcggccgagagcgacgagcccgacaacagcgcggttgaggactggagtgaggaagagatgagtgcagaagaggacgatgaagacgaatgattgccgaaggtcactcccctagaaagtgacccaactggcttcagagccaacagatacattttgtttgactcaaactatagggaacttaggattagtatggaggccaaatctgtaccaacctatcaatacactcagtcttaaatctacctctgttgcaaataatcgtccccctcgaccagggacacatgagcagctattcatttagagtttgcatactcctgcttactctgttaagaagtgctgtgtaccccgtcacagaatcactggtctgattaatggcttagcacattcctgaccaagtcgacccatcaatttcatcgataaacgaagggtttcataaaaatagcaaaccaaactgcagaacggtggaatgaaaaaaaatacacattccccgcgtaaggtgatattttcgttgaatgttacctgtggcggcaagttgtgtcgtgtaccctaaatagcaacattcgagcgacctaagtcgaaaatttgcgtttaccgatcagaatttaacaatacaaaaaagatgaccgggatggccgcatgatcttaactctaaatatcaatcgtgcagagtcctttgatagacagtgtatgacttcagctataaaagctctcattgttctctcagttctcatttcgaattgaccactaaaccaagcaacagacctttccactcgtccaacctaccctctagacgcgattaataccagtgcgttcacttgccgcagacccctaccgtactaactaactagttataccactcgatccggttaatcaaacactgcggactaatcggttggctgttgtatcaaatatggctactgtatcagtttagtggtagaactacttagcaagggtattcaaaaataaagaggcttcctgagccacgtgttgggctgcagggcagttggtcggggaatgacccgcacttcgcaatctccccgacagccccaagcacctgttcctcctcctccatctaccgcaagtatcatgattcagcatgtctgctgctgacacccatgcaagcgggtacgccagcaacagacatgcttgaacaagacgtacctggtgcctaataaggcaggcgtcgcagcgccgccgcctactccgccacaagtagctcgcgcgcaacgtcgcttgatggctggcaccaggcttgcgcaagactgcctggcgcccggaatccagaacgctacctgcataagtatacaaacatgcatatataggattacgaaaacagacaaacactttcatttagtagagtagctcaccttctagaacgacactaagggggacgtagaggaaggcttagagcacgtccttagcccgaagccttaaaccgaccaatctcactttgcattttacccaaaagcaagcaagcaacacaatcactccacgcaccttcgctacggcagattccagagcatccggagcctgtcaacaagggccgattttgtatcagctatctatacgacactgaacggggccgtagacaccggtgcggctgatccgttgtggtgttggtcatgatcagaatgtgatctcacgcattgaaacatatataaatggtgcggacaagcgcaagtataaatgcagcaactacgagaatacaagtgtgacaccagcgacactgtgcaagtcaccgcagtatattaccgcagtggttaacgggcaggcagactgtccagcggaggggtactgtacgatgagtctatttcggattcgtttcaaaaccagcacttcttaaagaggaagcacgcccgattagacaattcaatatgcagacagttcacctgctcctgacggcgcttgttgtcagcgccaatgccgctattggcactacggacctaccctacacaagtaaccaccacgtactcatagtgttaacgaagatagtgagctacgagacgagaaggaggagaacatttacactctcagctgtcgtaatcctcatgggccttatccctggtacctgcatcaagggcttctgacgtgttcacggatgtgaagacattgtgaacaagctggatgaggtcgtggagaggaacccgaatttcgtggagaagctgagcatggatcttgtagcgattgaaaaattagagaagaactctgattttgcttagtgtcgaggagacgaatatttcaacctgccgtgtatgtacatcatcccttcgctcttttgcgtcaccaacctatttttttttgaaaacctgaaatttcagaggttcttcgggccggaagcacgactttgttaaaaaagcttatcgtataatacttcttccatccgacatccatcttaacccttctgcgatgtattttatacttataatttgtaagggtatctcccgatgcaataccataaaacatggctagatgcatggttttacgccgcaacccctcccccccccccccccccccgcaaaccaaaatcggacataagactgggtttgttcgtacctaatgtaaaacatcctacttagtcatgttttagttaccgccccgacccctactggctaaaatcatcattcaaaattctgattggagcgattttgtaaaacatgctagttagtcatgttttacacagaatcatcacaaaagggtttgatggttagacagggttacacttgtttatagccaatcaaaacactccaaatagatattttaaaaatatatccctcagtgattggctactaatgtttgtcggatataagaccttgtcggatggaagaactattataagggaaacggtcaatcaggggccgttaaacatgtcttcaacgaatgtgcttgtagtttttgctctacgaaaaagtaggaaatagcaattgtaccattgaaaagagcgcagttttgccgatatgccgggacgtttcgcagcttgtaatcagtaaaaacaggcgcgatataagcaatgcaaaatcgtttgtaggatggacggccggccggccaattcgaggtctgttcaattgacttgggttcactatggatatcttatataaggctctataaatacgccaatcaaataagagaaattataaatgagagtatttcataggttgatacgagcgatcccgaattgacacacctgtccttgtttggtcgtttaccttaccccactgagacttttgctaggacaaacaataggacaaatatatatttctcttgatttcagtatggtgtgccacaaatttgtccttggacagacgtctaggacaacattttggtacactatactgaaatcaagtgaaattccattttgtcccaccatttcagtggggttacgatcagatattgcccgtgatacattttgctggtctactagcagtagttgctgccgagagtatgatgagttactatgactactgggtccatcctgaaatcacattttagatttgtgacgcacatttgtccaggttatgatacatttactacgtgattatactcgacgttgttgcctccacggagaaaaatagtactgaaagtaccatgctacttgagggtatcatatggggttttgtatagcgttgttggatgcaggcagttggatgcacgaaagatgcattggatgcattggatgcgcatattatgcattgcatctaaccatggctaccctccataaataaataattattattagtgtccgttagacgaacatgcactagccggtcgcgtcctgcccttagactctcgctacagcctcacctcacacccaagcttcatatccaaagctccggtcaatgttgccccaccattcgacagatgcgtactgatcatcgtcatctgcccagtctcggtgatgttcatactcctccagggcacgaccctgtatcaccgtcgatgctgaagcttgatattcgacggctacagaacgctcccttgctgttgcgtcctctggctctgcatcgcaacgttctgggggtcttgactcacttggacctggatccagttcagccaccgtcactgcgacgacgtcggaccgtgccttcttcatgccgtggttcgaatagatgaacaccagcatgatcaagcgctcgttggtcaatcggttgcgctgcgacgagtgcacgtatttgaacacgctccacgaccgctctgcagcagctgatgaagctgggatggtgaagatccgttgagcaattgtcgagagtatgggatagtccttgtccccgatccacgtccaccacgttatcggcgaatccgcgtggtaactgcgcttggtttctcctccccacttcctcttggcctccatgaacttccctagctctttgcgatgggcctgaatttgtgtcggcgtgtacggaaaccgcgcagcaagactttcaagatctgcaaccgtaaaattctgctgctgtgtcgtgaaaagccttgtatcccttctgtggtcgggcaggtatgcaatgcgcattgggcttgaatcaataaattcccaccgagcttgaatccgttcgcggaacatcgcctgcatgtccttgctgatcccaggaacgtcgtcattataaacggagccctgctgcagctccacaaactgctgaaaaacaaccgatagacacagtgagtccttctcaaaatgagcgagcaccttgtgaatcggggttaacagtttaagggccatgtctcccttaatccagaacgcttccgaacgagcaattcgcttgaacgacgtgaccttgagggcgttgtactttgctaataatgcgtcatccgaagccagctcccgaatactccgctcgctctcgacaactaacttgacacactcgtagcgagagtaccagcgtgtagcaacaggaatcttcaagctgcgacggttgtcaatgttatcaggagaacggatcgcttcggcaaagcgagagttcgttgctgtgtggttgcgaacaaaagtggcaacttcttgggcttctaccaaaacatcagcaagctcagtatcgcacagcacgtccttcatgagcaaaccgagagtgtgtgccgtacatcctgtcgccataagaccgggacacatattctgcaggatagcccacgcgctcttcatagcgctcgcattgtcagtagtcacagcaaccactttgccaacgccaatgacagcctccacctctgcaatcacctcagcgatcatgttggccatgtagggtccgcttttagtgtcctcgccagtcactctgcacatccaaaggagtggccgcatgttaggccccacgaggatgaagttgatgaaactttcacgccttgaattcgaccatccgtctgtcactaatgccacgtagcattggctcagcagggattcaacaagctccgccttctccaagccgaacgtttccacaagaaggtcgtcagcaagttactggtgagttgggaggaattccattgggcaacttcccgccagtatcgtgcgcacctcaggatcttcaaccgaccgaaatgcgcagcagttcatgtagaatgccatcgctgctggcatccgaaagcgcttcttgtcttctaccgttagtagtacgttgcccatatcgaggcgacatgcatcctcacaccctgcaggccgaggcacgcccgccttgccagtcttcaagcgcttagacagcagatcttcgccagcgtacgcctcacgaatttcaacgggcatccgctcacaggtcatgatgtgcttcttgaggtgccgtgacggctggatcttggtaaggagttgatcgcagtaccgacagtgggcactcttgtacttcaaatgccgcgtttcgctgacgatcttgaagtgctcccagggagcggggaacgggcgtccgcccgccatatctacacatgcatagacaccatcagagtcccgtattagtcacaaaccagcgccaagcaacagagcagcatatactcactggtaccctgcgccaggggcgtgaaggttggcagtcgacgagcttgccgcgatcactgagagaagatttttggcgggaaacttgcgacggtaatccccttcgaaaatgcatttttgaacccaatctatttggtgtaagtggtgtaccatcaatctgttcggacagggaatgcatccaatgcatccaactgcgtgcatccaacaacgctagttttgtataggatggtcaccccttttggcaaccccttttgacaacctcattttacgtcacaaatttactccactgttcgttttctttcacttttgctacaagaccaatttgtgatttcaggatgcacccactactagactcgtccaagccttcgtcgcaaatactattactatagtagtagtaagaattagcatttcaaaacccttcaaaatagcatactttccatcgcaaatttaaaattttgagcgaaacttccaaggcctgcgccctggtcattccgcattctcaaagagtggaatgcaactgcaacgctgcatagtcacaatattgcatcgaatgcaggacgttgtcacgggcccgggcctggacctggactgacaggcccctcatgggcgggtttcggcggagctaggcccggacgtgcaagcgtatcatgtgtgagtggttatcctattcttcaaggcaaagataatgcgagatggcgggctgggcgcggaactttcggtcgccagccgccaaggacgggtgtcatgaacgccaggaagctcgtgcacgggaggtatggcgtccacaagtggttgcagtaggcctggaagcgggtcggcggggtagccgtcgaccgcgcatgaagtggtgaaggattcagtcgtgaattctcctcgttgaaagcaagaaaccctttgcatttttacgagattgtcttcctttcttctagcgtcttgccaggatgctacgcgtctactctttgttggccgaagtactcggccctaacggaggaggaccgcaacaacgtccagcccggatggagattcgtgtagcatccacctccgagtcctcgaccaggactcctggttgcagcaaaccgcaaacgtctggcgaagctggctgaagtggctcgcgctgtgtacgtggggaggggagctgcagtaagtgaacccataatataatcagcttaaaatcaagcatactattgacttacggcgctgcacagagagggccatagagatcgctagttgagaggtagtgatcgccacaaccagaggtcatgtcgcctagagctcgggattcctttctcctcagcggggacagtcctcggtctgtgaaagagaatgacaatcaaagaatgagctgggctgccaacgttgacgagaaaagacgtgtgagttttttgacctagcaacctacttcaatgtgacaggataggttcggatttttaaattagtatttcgcgggccatgacatagtactgtataatatagtactggtatggggcattggttttagagtacagtcacacctctataaatgacacccagttcgctcggtctaatacgctgtttcagttaaagaattgatcagataaagaaatggctacacctctaatggctacattttcgcataaattgtgcaccacaatacaagggctttctttacctggtacccctccagcattttcgtactcttgttttgtttcgtcttcacacagacagaacttaaccaataacagtaggcgcggtattgtctgttcctactccttcttctcattggtattagcagaatcgcatcccctcaggttgtacgtgagtttcaatacagtgaggttatgggaatatttgttgtcccgatatcctgccaccatgcctgcagttttatcttttgtttggtatctactgcatagcccctagttgtctcgacatcatactattttagtttttcgtggttttcaggacgggtgtcatggcacacagatctattgcggctcaacctgtccttaaaacctttagaaggccgaccaagcagtgggcagggaactgtagacctaagccttgcttcggggctgggttgttcatgcttctcaaacgccattgatgccgatttggtctctgcatcacgatagatttgcggcccatttcaccccctccaatccgaaaacatgggctgcacattttcagtattaatatgaccgaacgaagttctaaacacactacaaggatttgcatccgaccgaccaagccatcccagtgggattcccacggccatcattttcgcgccgctggaagcgccagtcggtccaccgccatcatcggtctctcttctacggagatcatgcaggcgcctatgctgtgagttctttggcagcaccaaagtggcgaatattgagtcgctacagaacagcatccactgaacagcacgacgtgcttctcttgcatttctacagggggcgccatctgccgggtcaagccatgcccgatgtgtcatgctggcaaagtctccaggcgttttgtcctcggggtcgtgctgtcgcgtcttgtctagcgccacaaagccgtgccttgttgaccgatgtctcggtccgctccctcctgcctctcctctgcccgcaagctcacgacaagcttgaaccgccaaaggctgtcgcaacggagactgcactctcacattcatcttggtggaggaagacacaagtgtcaatactgctatggggaggtccaaggtgccgcccgacgtgttcccgccgttgcggctctctccagccgagaagcaggccatcgtcgactacacggacgagctggtagccgagacgctgctggccagcgagaagttcatcgcgcgccatcgcaagctcaatccggagcgctggaagtacgtcaagacgcaggaccacctccacgtgtatcgctctcgtcggcgtaagagttcgtcggcgtccgagcctccgcagctcgcgtcattgtccgaagcgagcagcgcgtcgtccggcagcattggggcgtcacagatcaatgcgtcgacgagttcggggggttccagcagccaccgccacgatgcggactacctcacggacgggtctctgctggaacgcgcccgtcctgaccgtttgccgctcgtggtcatcacgggcaggatggagggcacagtggaagacgcagcgttcggcgccttggctgacaacgaggcgcgctggaggctgcgagacacctacattggcgacgggtacgacgacgtcaagcttctagctaccgtccaggcgccgaccagggaggacccgttccgcttcctcggcgtcaagtgggcgactaaaacaatggggaccttcatgacccagcgcgacatggtgtacgtcgagtccacaggtgtcactcgcgactcaaatggggagaaggcggcctacttgctcatgcacagctacgcgctggaccgcgtgccggagctgtcggagtttggcgtcatccgcgcgcggatatcctcgtgcttcatcatccgaacgcactcggagggggtgctggaagtcttctgcagggctttcaacgacctcgggggtgacatcatggagggcgtgacggtgaacatcttcaaggacactctgctggcggttggcgggctcgtgcagtgcgcgtacgtcaagaagctcaagtggcagatgagcgctcgagagcgagaggcgagtgagcacgcgacggctttggcggcgcagagccacgctccgacgcattgtgcgggctgccaccactcgctgagcaagttcggccgcctcatccagacgggagccgcgtgtcaggtctgccgccgggtcttctgtagaaagtgcactgtcgtcaagagggtgggcgtcgacttcggcaacgccggcagcatcaccgagaagaacatggactcctgccaagaatgtgtcgcgctagcaatgaagatctcggccaaaggtgtggcgttggagacgatgctcaaaggcgtgagtcgaggtggtagccacagctctctatcctcctcgatgactaagtcgttgagcaagtccaccacttcaagctctggttgactgagcgggctatcttgctccatgaaggtgcaaaagcagcggaagtagataattatgatggtcacgagtccaagtgcgtggtaaaatgaagaaaattgcctcgaaccaaacacacaacaatgaatcctcaacgctgagtgcatgaaactgcaaaagctagatatctaatacttcgcagtacgtagcttactgatgacgattatccagtgacccgaattcagttcgtcaactcgtgtgtcgctcaccattgagctaacgaacgaagctaaacatcttcctaaacattttcgatgtcaaattgtgaaagtaccagaaggttggctcgccatccgggctatagggcacgtggtcgtgtctgcgcattggacacggcccactcacgcaccggaagggctaaggcgccacctgcttgataagattttggctcgtggtgagccacgatctaatcaatcttatcgagacgcgtcaatgtccttcagtgtcgtcgatccacaacaatcgcgtggatgcgtcgaactattgtctgcagatggagttagcgcgtttttcttaacagccacagcgcataccagccgacacaacacgcgccgtccgtcgtgctgtaccacggcaccaagttgcatgagtcattcttcaatttcctttattcgacgccactatggattctcctgaggtcgtctatccacccaggcccctcaaaatatctgctgccaatgcaaatgcccttgaactgttggcagaccagctcgtcgctgagactttgcgcgcaagtgacgactttatctcgagaggccgcgtagtcgacaagactcagtggaaaagtgtgaaaaggaaaaataacttgacggcgtatcgagcgcgcgagctcacgtcaagcagcagaactcgccgatctcggttcaatagcgaagacaccgaagccgtggccgagtctccccgcctgcccgagtttttcccatcaaacggcaagaacttcgagagctgtctgggggattcgtacctggctgtaagcgccacttgcaatgaagacaacgactcagacgacgaattccaaggaggattcagcatggaagacgtcttggagcagaaggtgatggagaaggccaagccagactacgtccccatggtattttgcacgggtgtcgtccccggtacagtcgaggacgctgcgttgggttttcttgcggacactgaagctcgcacgcgaacgcgtagcactatcagcggacacactaccgtcgacgacgtccaaatcctcgctcgtatccaagagccaaccttcgacgacccgtttcggttcttgggggtcaagtggtgggcccattctacccctggaactgcgggccgcttcgtcaagcctcgcgactcggtcgtcattgagtcgagcggaatggccctcgatgccgatggagaacgcttctgctacctgctgacccactcgttcatgctggacgaggtcccggagttcaagaagttcggccgcttgaggataaccttctccacctgccgcatcgtgcggacgcacgaggccacggggaacgtcgagatcttctgtcgcgggttcatcgactctgctgggagtctcagcgagcgcttggccacgtacttgttctgcgaaagtctcatgaggatgccgcggataatggaggaggcgaacaagcggaagctcgcgtggctgctgcagtcaaagcaccactgctgcagtagtctcggtccagcggggcatgcggttgatgcttgtccgagttgcagcgaaaagctgggccgaggagtcgagaggctactggactactcgatctgcatcctctgtcgccactccatctgccgaaagtgtaccattaggaagacacttttgctggggaccggtgggcccaaaatgaccaagactacgaaagaattctgcctgagatgttacctcgaggccaagaacttgtcggcgtggcaagtgggaatcgactcgctgcccgtcactaagcagccgtagattcggctatccgatacggacaagaaattcaaaacgaaagccggcaataaacaaagttagatagacacaacaaacgcctagctgtagtggtagatagtgtaattgtaatccaaaagtgttgaacataccagcctggagcaatcaatcaaacggctatgaagagatttcttcctcttctactttcgtatcgttcgctttctcacgaccatgctcgtcttccagagtcctgactacagctccaacgtcgtgcacgaagttgaaatacacgtagcggcagtcaaactccatgtcgtgccagtagttgaccgagatcgtcgggcaaaggtgcgcagcgcggtgataccacaacgaaggcaggtacagaacctcgccggcattcaccaccacctcgatcggactcaacgcggccgccagcggataccgcttcgtgtcgatgttcagtgggtcgacaggaatccacggcgtgtcgcctttgtccggtgacgacagaatttcccaggccacgtgctgtggaaacttgtcgtggaagcgctccgtagccaccagatccttcacgagatggtcctcgtcctcaggcttcggagacgccgagtggcgatacctcgtcgacggaaactcgcgctcatagagacaaccgaccgcagagggcggcaacaaagtgaagtgtttctggcccttcaccacgcagtacatgttctaccgcccgcaacgcagcacaacagtcagcccagcactataaacaacattaacgaagagcagattcttaacctcgtagtggtccttgtgcatcgtggacaccgctctctcgtcgccgatccagatattcacagcctccggctcgttcccgaacgcttccacagccaactccatagccggcggcacctcgtcaaacagtcccgggaactgctctctcaaactgtcgttctaccaataaacaacaaagtgtagccatgagcattgtcacctgctagtattctacccactattctacctacctggtgcgacaggtagggtacgccgtcgaacccgtcgcggtctttgagtatctggaggaactcgtgcagcggcatgtccctctcctcgggcatgacgaagagctcctcgtggtggcccggcagctccagcacggcgtctccgaagccgaagggggtcacgtccacagtcaccgggtggctgcccgccttggccaccaggtggtcgtcgctctgccaattggccatggctcgctgccactgcggactcgtcatggagttgagcagcacgaccggcacattgcgactcacgaactcgcggtggaactgcacggcgctgagcgtcgacgcgtccacgcggcggatcgagtgcaaaggggcccagaagtcctgcgtgtcgctctgcagccgccgcagcgccgcctgcagctccgacgtagaggaggagctcgccatgcggaccacaggtgcgttcgtttactgcatgcattcggtgtgccgcacaccattttctgtgacgtggagcagaagctcaggcgagacggacggaccgccttttgcgttagcaaggcgaggccttcgttgtgtcgggaggggggtcgagtgtcgatctgtctgctgcatgtacagctcgtgtatcacccagagtacagagctccggctcattcgggttttgcgccgtcgctaaacgttttacatcgtccttctgccggttgcctgcccggtaatgagcaggtaagattcatgcatctaactggtgcaaactgtcaaggaactgttacatgcatacatggagagtaagcttatcgtggcctgaagagcttggctgggcacgtggatgagagcttcactacatagccatcttgagctccgagctgttccatctcaggaatcctacagtagcagaatatttcatgagtcgaagcgcggatagacccagcggagtcagcagtcctcgatgcagcgctcttgcaacgcaagtggaaggacgctgccagagatttccccagctctgggacgctgggctttcggtccgaaagtttcagaatgagaagctgaacacgatacaacaacctcgcgacgtgtacaccaatcgacctgtcggacaggtcgattgtcctgtcctcttgtgtcaaatcagtgtcaactggggccatataaaatgcccgagcccgttgcgtcgtgacttcggctgctgcgcgcagcatcgtagtggcgctgacgccaacacagtgcaagtcgagtgccacttgtcaatcttcctgcagtttggcgcaccgaaacgggatggattcagttttccctcccaagccgttccccttgtctgcggtcgacgcgaacgctctcgagatgctggcagaccagctcgtggccgagactctacgcacacatgacgacttcatagctcaaggacgagctgtcgacatccagcgatggaaaatggtcaaacagaagaacaacatgacagcgtatcggagtcggaagcgcgcgtcatcgaggttccggcgggaacgagtcccgagtgacgagaccgaagccgtcccagcgtcgcctcagctgccgtccttctacccagcaatcgacaagaagttggagcacgcactgtccgagacgtacccgagtgtcacctacgactcggaggacgaactcgaggacgaactcagctacgtcgacgtattggagcagaaggtcttggagaaggcaagaccagagcacgcaccgatggtcttctgcaccggggtggtgcccggcacagtcgaagacgcggcgttcggcttcctcgcagatacagaagcccgaagccggacgcggaattccggcaacagagacgtcgcggctgacgacgtgcgcattctcgctcgcatccacggaccgacacagggcgacccgttccgcttcttgggggtcaagtggtgttctcactccacgcctggacctgctgggaagttgatcaagcctcgcgactacctcgtgattgaatccaccgggattgcgttcgactcggacggtgaacgcttctgctacgtgttgcaccactccattatgcttgacgaggttccggactaccagaagttcggcaacgtgcgcgttacgttctccgcctgccacattatgaggccgcatcaaaccgcgggggctattgagatcttctgtcgcggcttcatggacacagggggcaatctggccgagcggttgactacgtatatattctgcgacgcactgatgatagccccgcagactgtcgaggaagcttacacgaggaaactcctgtggctgtatcgctctcgacgtcgcgcagatagcagtcctcctggtctcgagtcgctccgaatctccgacacttgtccgtgctgccatggaaagctccacactggccttgcaaagctcctggagggtgccaccaactccatgtgccagctctgccgacacactgtttgccgcaagtgcgcagtcaagaaggcgttgcccctggacattggaggacccaagcaattgacgatgcagacgctcgacttctgtctgggctgctacctgcaagccaagggcttgtccgcgtggcgagtcgcaatcgccaccatgtcgacgtcggccacagagtccaagagctgcgaacggatctgagctgaccggtatgctgtacggtacacagaatctctcttgacggcgacctctttttacgttagcaagccgggcctctgaagcgaagatgtcggtctgtctgtgtctgttccagttgcaatcgccaaacgttatcgaccttgtgtcgacggggccacttcggtaacacacacttcggtgggctatcaaggagctacaatgcagcacgctgtactgcatattgtacactgatgggactgccagcacgagaaggatattgttggtcgaatgagtcaacatttcgctaggctcacgttagctaagatatttgctcttgagtctcaagttgagactttgagcatttactgatacgtccaagatgatccttacatgtgatgctacagcgcactgcctccgcccccaagaactgcaagcagaaattttgacgaagacttgaccaccagcatcgaggatttcgccaaagtgtcgcggagaccaatgccgggcccaagcagcatcagccgtcaatgcaacgttcttgcaaaccggcggcaattgagagcgtcgggacggcgccacagaatgagaagcccaacttgaaacgatcagacaacgctgcgtctcgtgatttcaacaactcggcgacttctgtaggatgttaaatcatgttgtgtcgaccaggaccatacagaaggtccccactccgctgcatcgtgacttgcagcaatttgcaagacgagttcacattgtcaagcttccacgctgaaacacaatggatcctgtctacccaccgacgccattctccttgtctcctgccgacgcgaatgctctcgagctgctggcagaccacctcgtggccgaaacattgtggacacacgacgagttcgtggctcaagggcggatcgtcgacctcagtccatggagaatggtcaagcagaagaacaacctgactgcgtaccgggcccgcaagcacacgccatcaagatttcggcgggaacgagtcccgagtgacgagaccgaagccgtcccagcgtcgccacagcttccgtcgttctactcggattaggacacgaagttggagtccgagacggacccgagcgtgaccctcttgaaagacgactcggacgacgaatttgaggacgaattcagccacgtcgataccatggaggagaacatatcggagaatgcaagaccagagcacgcaccgatggtcttctgcaccggggtggtgcccggcacagtcgaaggcgcggcgttcggcttcctcgcagatacagaagcccgaagccggacgcggaattccggcaacagagacgtcgtggctgacgacgtgcggatcctcgctcgcatccacggaccgacacagggcgacccgttccgcttcttgggggtcaagtggtgctttcattccacgcctggagcggctagaaggtttctccaccctcgcgactacgtcgtcctggagtccactggcctcgcgctcgactcggacggcgagcgcttctgctacacgttgaaccatacaatcgagctcgacgaggtccccgactaccggaaattcagcaacgtgcgcatcaagttctccgcgtgccacatcatgaagtctcacgaatctccggggaaaatcgagatctgcagccgcgacttcatcgacgccgggggacttctcgctgagcgtttgactacgtatatattctgcgacgcactgatgatagccccgcagactgtcgaggaagcttacacgaggaaactcctgtggctgtatcgctctcgacgtcgcgcagatagcagtcctcctggtctcgagtcgctccgaatctccgacacttgttcgtgctgccatggaaagctccacactggccttgcaaagctcctggagggtgccaccaactccatgtgccagctctgccgacacactgtttgccgcaagtgcgcagtcaagaaggcgttgcccctggacattggaggacccaagcaattgacgatgcagacgctcgacttctgtctgggctgctacctgcaagccaagggcttgtccgcgtggcgagtcgcaatcgccaccatgtcgacgtcggccacagagtccaagagctgcgatcggatctgagctgtgctgaccaacgtgtcgcactcggtttacgagcgccgccccctatgaaaatgcaccggagtcggcctcaagttgcggtgcagcgttgagagagagacccatttttgcgagactcactcagcctttggcctcgtccgcctatccaaggtggacgcccaaccctgcgtagcacagacaccccggccccttggcgatagcgaagccaagtcggctgattctcgagattggcctggtggcacatgttcatgtgcgactcgatgcacacgacagccgctgcacttggaaacatttgccggccgcctcgctgggtcgtcgtcatttgtagatttctcgcagcaaccaccgaggagcttccaggagcttcatggagaaccgaggtgtagtgtaccctcccatgccgttgaatttgtctgacgaggacaagcactcgatcgagaaactcgctgatcgactcgtagcggagactctacgcgccaacgaggagttcgcggcccgaggacatgtggccgaccccagctgctggaagccgataaaggagaaggaccacgttgtggcgtacctggacatcgccactgccggtaacaaggctcggccctccaagcgcgagagactttggagcgaggacacggtcgtggtcgcgtcctccccgcagaaccccacgctctacccgaccagcgaccgcgatctccaagatttattgcgtagcgggccgctcaacactttcgacgacagcgactcggacgacgacaggagtcaaagcttacaccacgatgagttcaccaagttcggcgccaaaggcggctccgagatgagcgtcctcgagaagtttcggccggccgacgtgcccattgtgttctcctcgggggtgctaccgggtaccgtggaggatatggccttttcgttcctagcggacacggacgaacgcagtcgcatgcgcttcaataccaacaaggattgcatcgtggaggacatgaggatcctctcgaaaatccgcgggccaaccaaagataacccgttccagttccttggggtcaagtggtgctctcacaccccaagccgcacggtgtcacttgtagtcaagcctcgcgactatttgattatcgagtccactggaatggctctggactcgaacggagagcgcttcagctacttccttaaccactcgatcgagatggacgaggtgcctacgttccgagagttcggccaggtgcgcacgatcttctccgcgtgccacatcatccgccctcacaagaagaagcacagcgacggagagttcattgaggtgtttgcgaggggattcatgctcattggagggagctttagcgtccgtcttagcgccactcagcttgccgacggcctcctgctcatgcctcgcttcctggaagagtccttcttgaagaaactggcgtggctcatgcacgacaagctccgctggtcttccagtagcagcaacacgagcgactcggccaccaacagcttcagcagcaacagcagctcaaggtcgatggtagtgaaggccagcgcctgctcgtgctgccacgcgaagctctcttcgcgcttgggagggttcctagagaggagttccagttgcagtctgtgcagacagactgcatgccacaagtgcacggtgaagaagctgctgcccgtggaaggctcgcgcggccggcacatgaagaagaaggagttggagttctgtcttaactgctatctgagggcaaagcgtttgcctgcgtggcatgtggcggtggccacgctggcgaaagactccgcatagagagcagagatcgatagatagagcaggggtaactagagaatagattctgtacacgtatgaacacgtaatgaacagtgatcatcagtcgattcaggcgtcataaaaacctctacatgtacatcgagaagtagatgaatccctctatagattccaacccatgactcatgggccatgagcgtgtggtgcgacgccacaacgttgaagaacaccttcctgcaatgaaaatcgttgaattccgtcgtgcaaagatgacctcgaactggaaagtcaagacgcgatgttgagcaccaccaaacgattagtcacggcacgcttatcaactctgtcacgcgcgtcgccgctacttttgcatgacagacaaagaatgaatgaactctgaaagttaggtgcacaaggtgctttatggttgctgcgatgagctttaaactacgggctagaactatcaggcggggggtatttatcgaaactacactagatgaactgggttgactacttgggcagcgtggccagcgccactctccacgccgacaactgcttggccttgaggtagcagttgaggcagaagtcgaggctcttcttgctcgacgagtccatggacaagttcttcttgaccgtgcacttcttgcagacctttcgtctgcacagaaagcaggtggtggtgctctcgagcagcttcttgaagcccttggtgggcagcttatgacagcacgcgcacccctcgtgcttgtcctcctccgcgtggacattctggcgccgcgcgtacgcgtgcacgaaccacgccagcttcttcatgtacgactcctccaccagctgcgccgtgtccagcataaactcgcagaagagctgcgtcgacgcgctcacgccaaagtggccgccggcgttgcagtagcctcggaaatacacctccacctctccctggctgttgtacggccgcacgatgcggcagcttgaggtgagcagacgcaccagtccgtgcttacggaactccgggacttcctcgatctcgacggagtggttcaaaaagtagcacacgcgttcgccgttcgcgtccagcgttgatcccgtggactcgagcgtgacggtatctctgggcttggccaccgagccgcccgtcttgctggacgagtaggagatccacttgatgccttggaaccggaacgggtcttgctgggtcgggccccgaaactgggccagtatccgcaggtccttgacgttcacctccttgcacgtggccgcgcgcatgaggctgcgctccagtgtgtccgccaggaatcccagtcctgcgtcgtccaccgttccggggatcacgccgccgccaaagaccatgggcgtgttgcgcggccgcgacttgctcagcacgctctgctcgggcgcctcggggtcgatgcggctgctctcgtagtagtccgagcctgcgtacgagctgccgccgtcgtgagaagagccgcacgacaagtgcgtgttgccgcggcccatgaggtcgcttagcgagctgtcggccgagtagagcttggggcggtgcacgacggacgtctcgaccgcctcctccgtctcgagtctgtcgcggcgcgcgcgccgctggccgcgcgaccgcgaacggtacgccgtcatgctgcccttctccatgaccaccttccatcgctccaggtcgaccgaccgacggtccgagatgaactcctcgctggcctgcaaggtctcggccacgagctggtccgccagcgtctcgtactgctccctgtcgtcgcgcgtgagcacgagctcccgaggcgggaagatgtggcccgcgtcccacgagtctccgaagcgcatgctgctgctgctgctggtgcggctgtcctcaagtgctatcaacccacggactgcagtgtccgagcgagagcgcttcgcgaagtgaggccgggtggtcaagcagatgggaaaggtccgtcctgggcagtggcagcggaggacaaaagttgaagagagtgcagcggagaccttatccagcttctacaaccagcagtgggaggcccgcgtggttcgggatccttcaacagggatcggagcgtcctccttctggcatcgctacgtcgcgacacgggagcatgtgcacgggtgtagagtcggctgctgctcacccggcgaagaaacgaggcgccagccaatggagcagcgcgcccaagccgcgtggaagcttcgggtcaccgcatcaacccgggtgaattgagcggcgttacgagctcacgacaggaggaacatgcacgccggccgagattgaccagccacccgccaggcggcctgctggaggctttgcccgagtcggtgctctccttatcggctgccgcggacgtcacggtcgggccccaaccgcgacacttgcatgatcatctgtactttgaataattttgtgcggcgttaccgacaccgcatggctgtcatgctgatctcggtgctgctgtggcccaccgagagcgcaaagagagcgtcaaagagagatcttatggctccaggcctcgagatcctggggccgcgtctgcctgcctgccaggtttgcgggcagtgctgcagttctgccatcagtgatggcatcacggcgaacaaggtggtatccacatgtagtgctgtcggacaaggaggaggagggcgcgcagagggctctcgtgattgagacagcggaggccgccagtaatttggtgctgccacgatgggggcgccacaaccttggcagcatgtacagtaagcctcgagggtttaccgtatttggcggtttgactgcagacctgcaccgtacggtgtatacgtatgctatatgtagtgcaggttttgaccgatcgctggaagtgctcgctgtgccaccgattctttcgcgcctctcctctgtgagagcaagacttgtcctcttcctacatgtactgtagtaggatgttcctacctcgcccgaagttgtcttcacgaaagatacaacgcggacgtcgatagcctcggtgaaagccgctgcacagattcgccatccagcaaactgcaagaagctgcgatcgtcaacacggacagactcggaggtacatatcgcgctcgttgcttgcggacctgcgcggccacatatctgctagtttttcgccgactctgctgcgcgagacagtgctcaagcgatcgcccatttaacaacgcgcttgatgtgtcctgcactgctgtagtcccaccgcagcgtgcaacttgcaccacttggactccaagttggaggctcctccaagttcgaggacaccctcgtcgtgactcggcatgataaacagctccgacctccgacgtctcagtgaaacgtgatcgatggtggcacctcgaagtacaatgcaacgctgcgtttcggtgtgctgtctgaacggatgaatgagtggatggagacgaacgagggtatgtatctacacagcaccttcattagctctaaaatacggtggctctatctgtagtcaacgcgtgctgcctcaccttcctggacgatactagttaccggcgcttgagctgcgcggtcgcgacgtcccatgcggacatttgccgggcctcgatgacacacgacacgcagaaggtgagagttcgctgcacgtcttcggctgcgtccagcagcagcttcttcttgacgctgcacttctggcaaatggtttgtctgcagatagcgcacgtgcccccagcctgaatgaggttgaacctcttggtgcccttgccgcagacaccgcagtccttcgtgtgtagcgcagacgcgtcgctggtccgccggcgcgccatgagccacgccagcttcttgaggtacgaggcctcgacgatgcccacgacgtccacgacaccttgggtgaaaacattcaatccgacaagcggcggcaagctgccgcccatatctgcgtatcctcgcgcacacacttcaatctgcgtctccgaaatctgccgcatgatgtagcaaatggacaggttcaggcggacgacgttgtagctatcgggaagcacggggcagtcgtccagctcgaccgagtgggccaaactgtagtaaacgcgctcgccgtccgagtccaacgcgatgccggaggactcgatgaagacgacatcccgtcgagagacaaagacagcgatgtcgcgggtggcccatttaatgccgatgaaccggaacggatcctcctcgctcggggcctggaaggaggcgagaaccttgcgagcgtcgaagccatcgttcttcacgtaggcgttgcgctcgagccaggcctcgttcgtatgggccagcgctccaaacgcgacgtccgcaacggatccgtcaatgattccggtcgctgcgaccagcggcacgtgtgagggcttgaccttctccagcacgctctcctcggggaagaccgagaaggaccctgcgttgctcgacgagctctgtgtgtgttgcgaccgcgagacgctgctggcggacttctcccctggcgttcgctgcggttcctcgtcttcgtcgtcggaggtgaaggcgtgcggtcgacctgccgccatcgcctgacgctgctgctcctccaccgtgttgttcgacagcaaccgcggtcgactcgggtgtttctcgttctcgagatgcttcaggtacttggaacctgaacgccgggtgcggtacgcgtgcaccttttcatgggacttgatgggcttccagagccgagggtccacttgccggttgttggcgacgaaccgctcgtacgagcgcagagtctcggccacaaccttgtcggcggtgtcggtcagcgcctgcttctgctccttggtgagggtcaaccggtccgggatgattccgtccgcgcgcgtgtaggccatcctgatactgtagagcagttcctggatcaacggtctccgatacaagtctaggtgctcgaaagcaagtttcgaagtggctgcgaagattgaggatggaggcgtcgcgcggtagttagtcctgtcaaccttaccttacacacctccaacctccataatctcaccttcctaacctccctaacttcccctttacaaaactcagtataatggaaaaagccgggaccaaactcccagccaactcgggctcggagctggtagtgggcgtacagtaccttgggcgtggctgcagcttccagcctgcacgaacgcagcatattgcaggacagatttccaagcctcaccgtttgatctaccaataatgtgaacttctacagtgtagtagtaaaacaatacaccttttattgtgcctttccatccatttacttcagaagtacaaacatgtatcgatgactacagcgatctgtccaagttgcggaggatgcgagtgccgctattaacgtcgatcgtagctctttaagacggtggtgggtcacacctgaacctgtgcctctgtacctctgtacccgcgttcatataaaacgagaacgtctagccttcggcttaacgaagccttgtcagcgtggcaggaggctagatgttctcgtaggcaacagtggacagacgccagtttgctgaagaaacactatcgacatgtgcgaggcgctattattcagcgcgtcagtggggaacgatgctcgttgattatccaggtcgaccacttcaggctccaatcgagccagcttgaggtacctttgtgtcgttaaggaggttaaagcgaaagtttagaaagtccagtgagtttggaggtgggttaaggttaaggaggtcaaggtaaggttatgacagctgaggttgacaggactagcggtagtgcgacgcaggagacgaggaaggaggagcgatgccggtgctcgcgagatggggacccaaggcacaaagcgaacatgggcgccaaccaatcttgaccagactccatccagcaccagctctgcaagttgcaggagcagagatcgagcgctcgtcttgtatgtttctctgctgtttcctgctcctcagcgtcgccacgtcgctttaggctcacaaacacacagaaaacttcatgccctgaaagccgtcacgcgcttcttctgccataatgatcacttggctgtacagtacccgtacatgcgcgcaatgcgcgcgccgcgcatgcgtccgtttaaccacatctttggatacggcaatcgttggtcttcaaacttgggccaaggctctaggcggatcggtttgctgtcaaccatgtcttgtcctgggggaggcagagccatagctttcgagccattttacacgccgccgtgagtcagtcaaagctgtcgtgtcacgacgtgacacgagcgccatagggccgcgtgagctttgtgctgcctcgagggcaaatttggcaggcgcatggcgactcaaatcccagcgcggatcaacacgggaaccatccactccggcgtcgcgtctccagccgaaaccgaaagctccgggcttccgcatttcgcagcaactccacgacctcgcaagcaagagaaggctgaggccgagaggctttctccataaaggcctcatcgccatgaagttcaccaattcgtttaatccttatattcgccggagtcttgtgtttcctgtgtacttcgacactaaaatatgacaaattgtcacgtagcgcattgcttggacgtgctcgtaccttttcaacgtttcaattcggctctttcaatcatgaggccgtgagcactgctcactgagcagtgaggtggcgacgtcccatgccgacaaccgccgagcttcaatgacgcacgagaggcagaaggagaactgcttctggacgacgttctcgggcgacacgatggacaatttcttttgcaagctgcacttgctgcaaaccgggagtcggcagattggacacccgctgctggactgcacgaggttcgagagcttattgacgctcttgccgcacacgccgcagtgacttgaccgcgcgccagcagaatcgctctggcgacgtcggctcatgaaccaagacagcttcttgaggtacgagcactcgaccatacccgagacgccggcgaccgcagcggagaagaagctgacgctaaatccctcgggcatctcgccgcccatgtccgagtatcctctgcagtagatgtcgatcttgtcctccgtcaactggcgcataatgtagcagctcgaaaggttcatgcggataacattgaggcgttcaggtagacggggaacctcggccagctcgatcgagtgggccaagctgtagtacacgcgctcgccgtccgagtcgagcgcgaagcccgacgattccaagaacagcaggtcccggcgcgtcatgaacgttccgtagtcgcgcgtggcccacttgacgccgatgaacctgaatgggtcctcctcgctggggccctgcagcgcggccaggattttgcggccatcaaacccgtcgttcttcgtgtacgagttgcgcacctcccaggcgtacatggtgtcggccagcgcgccgaacgccgcgtcttccacggatccgtccatgatgccgctcgcctctatcagcggcacataggacggctttgacttggccaggacgctgtcttcaatagcgaaagatccgccctcacttgtggagctgtgtgtgttggtttggctggcctcgttgccatgcacttcaccgtcgtcgtcgctcacgaatccaagggggcggccggccgcgatggcgtcgcgctggtgctgctcgaccgcgttgttggacagcagtcgcggccgactcgggtccttctcgttgacgtcactgctgctgccgcgcatcttgctgcccgagcggcgcgtgcgatacacgtgcacgttctcgcgcgacttgaccttcttccacacgcggccgtcgacccgccggtcgttggcgatgaagtcctcgttggcctgcagggtctccgcaacgatgcggtcggccaggtctgtgagcgcctgctgttgctcgggggagagcttgagctgcttgggcagcgcggcgtcagcctgcgtgaagctcttcatggtcggtgccgaagtctccgataaccaagccttcagtcaagctgagtcagcactgagctcgactcggcaagtggtgaaatggccggtgggcagcatcggcggcgaagggtggcgaaggcggcgcatagacggcagcgccgatggattgatgcggttccgcgaaggcgtcgctggggctgtctgctgcgcgcggctcggctctggaagccgctcagcagacagtcttgctggcgaggaaagagagcccgcgggctggctggctgccacgaacaaagcatgcgcgccgcgggtgccttcaattcgcagtcacggagctgctcggacgaggtggtaaggcagggttcacctctgtccgcagtcggctcgaaagacatgttgcctcccactgtgggccacagcgtggccgaaagcgttggccatgaaggcgggactcgctgcgatcgcgtgccaacgcgcatgcaagcgagaccatggagcgaccacaatcgatcgattcccgattgtttttgcccgcaggaatacgccgcgaacggtgtcctcaagccgtttacgccacaccttctacgagccctggggagagccgggctcctgggctcttgggtgaacccaaaaagactctggagttcaataggttaagtgaaaggagccctccagaactgtgagccctcgttaagggctccctcacctgtgttaaatatctcgctgatgattggccgtcattgaagtatctccaggttctaacctgaaaaggcataggaaagagggcttctccttgaggggaaggaaggactatcggcgacgctggggtggcctcggagcggctgtacacatatgagcggcgcgagatcttctcgtgtggcgatctttgagctcgatcttctagcgtggcgcatcgatcacgcgaatttgctcgccttaagtctaggtaaaattggccaatcaaatattactaggaagagcccgtcataggtttgaagctaaatttggggagccctggaggggaggggctccttgatctcgtacttaccatgagggagcccattttgtgcgacttttggctctcgttttagggggagcccacttttgaagtagacgggctcgagctcgaagaaggtgtggtgtggtttacgctacgcctggtccggctacgttggactcgtctgtagactgacccgctcggtgtattcatccacaggacctaaagcgagctatccgagacctagctacgtgtattttgtctggtttaaatagtctatcctacccgggccaactaggagctctaaaggcaggccgaagcgacttcccaagccgatagctccttggcctcgatcacgcagggcaagcagaaggtgaagctcttctgcgtgacgtcctcctggcaaacgtccaccgagatcttcttctgcacgctgcacttgctgcacgtcacgcggcgacaaaccgggcagcctgaattcgactggagaaggtttccgagcttgctcagtggcctgctgcacacgccacactcgctggaggactcaatgcccgatgcatcgctgcgtcgtcgcagcgccatgagatagctcagcttctttaggttggagcaatcgacgatccccgcactcgacagcacgttgttggccagcagcatgactgcgtagccctccatcatgtcgccgcgggcgtcagcaaagccgcgagcgaacatctccaccatgtctgggttgacctgacgggcaacgtacgccattgacaaatgaatgcggacgagtccatggctcggctcgagctgcgggaagtcgtccagctcgatcgagtggatgatgtagtaaaaaatgcgctcgccgtccgagtcgaaggccattcccatggactcgacgtacagcaggtcacggttcgttgtgagggcgccgtagttggccgctccccacttgacggtcatggcccggaacggatcctcctcacttggggtctgcagctctgccagctccttccgctggtagaatgcgtcgttgtggacgtaagagttgcggatgagccacgagctcttggtgttggccagcgcaccgaaggcgacgtcctcgacttttctgtgagcggtgagtgggacggcttgaccttggccagcacactgtcctcgggcagcgtgaaggaccccgcgtcgcttgacgaactgttcgtgttggtggtgctgacgtcctcgtcgtgaatcgggtcgtcataggcgtacggtctgcccgatgcggccgcctgccgctggtggtgctccatcgcgccggccgacatcaacctcggtcggctcggatccttctcgtcgatcgactggctgtgcagcttctgcaccttgccgcgccgcgagcggtagacaggaccttctccttggacttgacgtgcttccactggtcgctggggagctgccggccgttacgtgtgcagcgtctcggcgatgaagccgtcggtcacgtcgatgatctcctgcttcttgtcctcggacagacgcatgcgctcgggcacggcgcccggcttgaggctgcacttgctcgttgtcggcgggatggcttcagctttggggccggggccggagttctcgaatgacgagccacttcgcgtttgcctcggtgtggcactcggggctcgcggcccgtgaccgcccagctgcaagtccttgagattgcctttggagatgggaagctcggcaagatggacgcacacagcgcctgcattccgttcagagacgcagtctccggcgcggcggcgcggcgctgttgtggcttcgtctgcggatgtcgcgccgcaaaactttttcgcaaactttcgtcgcggcgtcgcgcgcgttagacacgcgcggggcttcctcgccgccaaagtgtccggggttctcctttcgcggcggggcaagcgcgtaatggagatggccgatgcctaagttttgtttgtcggggagcaaggggcgcgaaggccttgatcggcaggaaaatggcttgcaacttgcaagttgcaagtggccgcagtctcttctgtttttcgccgtgatgcccgttgcagtctaccgcgcatatggcgcgcatagaggggagctgcagctcctcgacgagagcacgatcatgctcgttgcgttggctcacagccatcccgttgaattgcagcttgccaatggcctcgggccttggaaacctcgatccctagggctaaagatggtcgctcgaccagatcgagttcgtcatgtgacggattgagaagaacaagttcgagaactgggcgcctcggatcgaaagtatcctccgtccgaagtacatgtcgtattgaaatacaaaatattgcagatgtaataccagtccttatggaaacttgctcacttttattcagacagactgcctagttgaggctggcaatctcgtccaattgaccgtgccggaacgcaacaattgcagcctgcaattcgctgcatggatcaagtccggtgcacgcacagaccgcggcctcgcgagaacgcagcaagcacaaggtggcgcttagtctgcagctttccctacactgtagtcgacgctggcaagctggcaatctcgtcaaattgaccggcttgggacacgacaatactatggccaggcagctcgttatccggtggaacgaccaccaacgtcctcgcgcgcgaccgcggtgccgcagcgctcgcaccacgacgtcgactcgaagtgtgtcccaagcaacgcctggctcaaaatgatactcgaaaagaggagctttgcccgtaaacgagcgcaaggcaggggggtcgtcttggttaaaagcaaggaaggtgctgtagcatcatgcactcgacgatgctgaactgcagatcgaggcgagtctcaatcgcgcgatgacatttcagtcagctttgaagtgccgcgtagcgaaaactgtagcgttggatcggccagatgttgaagttttatcaaccgcttcgagcacatgggggtgctaacgcaactcagcgacgtggaagttatacctggaggtggccagcatctatctatttgtccagtttaaatacactgctatatcgtctattgaattcggtcacgaactccgcaaggtggaggtggccacttgccaggccgagagctccttggcctccagcacgcaggacaggcagaaggtaaagttcttctgcgtaatgtccttggacgcgtcgatcgtgagcttcttctgcacgctgcacttgccgcaggtcacgcggcggcagatcgggcagccggagtgcgtctggagcaggctgccgaggttcttgagcgacttgtggcacaggccgcacttgcccgacgaagaagcaatgcccgatgagtcgctgtggcggcggcgggacatgagccagctgagcttcttgaggttggagcactcgacgacgccggcgcaggacgagacgttctgggccagcagtccgatgccgtggctctccatcatctcgccgtggggatcaacaaacccgcggcagaagagctccacgctgtcgtcgttgagctgccggacaatgtagcaaatggacacttgcactcggatgatgttgtggctgttctcgagcgtcgggcactcgtccatgtcgatggagtggatgaggttgtagaacacgcgctcgccgtccgagtcgaaggccatgcccatggactccaagtacaagaagtcccggcgcgtcacgaacgggccgaagttggccgtggcccacttaatcacgacggaccggaacgggtcctcctcgctcggcgtctgcagcgtggccaacagcttgcggtcatcgaacgtgtcgttgtgcacgtacgagttgcgcaccagccaccggtgcatggtgttggctacggcgccgaacgcggcgtcctcgaccgtgccctcgatggagccggtggccacgacgagcggcacgtgcgcgggtttgacggtggccagcacgctgtcctcgaagagcgtgaaggagccggcgtcgctgctggaactgagcgtgttggcgctggtctcgtcctcctgggccgggtcgtcgtcgtaggcgaagggccggccggacgccgcggcctgctccatagccgaggccgagagcagccgcggccggctcgggtccttctcgtcgtgcgactgcgtgtggtgcttggccgacttgcccctgcgcgagcggaagacgcgcaccttctccttgctcttgacgtgcttccactgttcgtgcggcagctgccggccgctcgtgatgaacgactcgtacgtctgcagcgtctcggccacgacggcgtcggccatgtcggtcagcgcgtgctgccgcgtctcggccaggtgcaggcgctcgggcatggcgcccgggccgagcgcgaacttggtcatgcctgcgttgcggcccgcgcgacaagtctgggaatgaggagcccatgcggctgcgcgggccagccgatgaggtgactgaagctgctcgccgcggctttggatggctgcatccaacgctcagcgcgtctttgacgtcgcttcggctcgtctcgctcgaattttcgcggtccttcggtcgccgcgttgttgacaagcaagccggtgggtgcgctcgagggtcttccctcctcccgacttacatgtgcaacgcgtgacggtctccgatggctgccccgagcaatgccttggcggccgtgtctacactgtactgcggcctcttctgcatcgagcgccgacgttggcgccttgctgacgccgtcagactgacggtcggcgcgttaatgcagcagaaagtggccgtcatcgcgcgtgaccgccggtccgccaccactaatgcgaattggagtgagcgccgagttgcagcgtgccttctgcccggcggattgagttcaacccggcgctcaactcgacgtgcgattaatccacgatcctaagtccacatgtgcgggtggatgctgaatattgccgagctgcaaacgcccgacgcgaacttgggatgttgatcgcgagcagcagcaacgacttcgcgatcatcattgccgtcgtgggcattggtttgcaggcccctgggtccgacgccgcaatttctcatgggggaccgaggttctgtcccggatgtctgcgagcaggtcggcgcctccgaccgtggatatccagtggtcgaccgtggacctccggttgcggcgccttacgccggtgcttgggggctgcaccggtggaagtttctatgctgcgttgatgctgtcgtcgacagctcggagcttcaagcggcaaagcgccgagccgatctcgccgcgccacgtctgtaagctcgtcggcgtcgacatctttggaatcgtgcacgccttgaagttgttgctcgaatgagtcaaagagtggttcggctcgtgacttcgtggcgaaaaatgcacagcgcaacttacattgaagccaagactttcttcacgaattgatcgttcgcagcgctgcctatcgtaacttagactctaagccctagagtgcaccgacttcgagtcttctacagaatgcagtgcgcgttgggcttcttctagctgttcggccttcacccaattgcccgcttgtgctgcgaaaacaaacatccacctttcagcacaattttcggggtgtcgatctgtaaaaaaagtgttcataaaaatattttattgatcgtccaggtcttcatcacgggcttcgtcggcaggatgttgcgacttcccatgctgccaactccttggcttcgagtacgcacggcagacagaaggtgaagttcttcggcttcgcctccttgtcggacgcgtccaccgtgagcttcttctgaacattgcacttgttgcacgtgacgcagcggcagatcgcgcaccccgacggagactgcagcagcccgagcttcttgagcgacttcttgcacactccgcagtctggcgaaggtaagacacccgctgcatcgctacggcggcgaagcgacatcaaccagctgagcttcttgaggttcgagcactcgacaaagcccgagcagttggccacgttgtgggccagcatcaagatgccgtagctctcgagcatgtctcctcgcggatctacgaagccccgacagaacatctcgacgctgctgtcgtctagctgccggccgatgtagcacgtcgacatctgcacgcgaatgatgttgtggcggttgtccagcggagggcagccgtccagctcgatggagtggatgaggttgtagaatatcctctctccgtccgagtcgtaggccatccccatggactcgaggtacagaaagtctcggcgtgtcgtgaaggcgccgtagttccccgtggcccacttgatcgtgaccgatcggaacgggtcctcgtcactcggtgtctgcagcgtcgccagcaccttccggtcgtcaaagacgtcgttgtgcacgtatgaattgcgcacaatccacgagtgtttagtgttggcgaacgcaccaaacgccacgtcctccacagtgccgtcgatcacacctgccgctacgacgagaggcacgtgggacggcttcatctgcgccaacacacagtcgtcgcccagcgagaacgagcccgcgccgctggacgagctgttggtgttggtgctgtccttctcctgccgaacaggctcttcatcgtcgtcgtcgtaggcgtagggtctccctgacgcctcacgctccatagccgacagggacaagaacctcggacgactcgggtccttctcgtcttgcgactgcccgcggggtttgggccccttgtcgtgtcttgaacggtagacgtggaccttctccttggacttgacgtgcttccactcgttgttcggcaagtctcggccgttggcgatgaaagtctcgtacgtccccagcgtttcggcgatgatcccgtcggccatgtcatttagaatctgctgctgtctagcggacaggtagacgcgttcgggcacgacgccctgagcctggaagcttctgggcattgcgatgcgatagagtgagtggagaccgacgtcgcggtttcgaggcaagtctcggaatgacggggcccgaggggacctctgcgtgaacagctgagggatgagttgatgaagcttgaccgtgacctggagtcggaagaagctgcaacgtagcgtacagagaccgtcgggtgttcccagatgccgatcagtggagaccttcacgctgaagttgagagattcgcaaggccgccgctcccacttgttggtttggctacgtacattatccatccttgcacctccagctgcagtcgatgtccgatcactaggacatcgggcccggagtcaacatgaaaagcttgccaactgaatgtagaacaccatgtcgctgtactgtatcatttgacctggaatctacgccaaaaatccgtagggagcccttcgccacgctgactgttgccgaagcagcatctggcgagcatagagtggcaagctgatatgcagtggtgggcctgcggagctcttcctctacgagcgagcgatatgcgagttgcagtgccgccgagtttttttgtgaccggcgtcgattttagcaccaggaagcgctttgctggcccactgcagtcagctcgatgctggcgagtcagggaacttgcactcgtccgtctactactgtggatcatatccgatacggtcaccaaaagcaagcagaggtgctcaatccagcctggattccagaccctgtatggatacgagcaccccgccttgaagtattacccatggaagcaggctcttggatagccgcaacgctggcgcttgctgcgcttcaaggacaccgcaggctggaggtcgccacttcccaagctgaaagtttacgcgcctcaatgacacaagacagacagaaggtgaagctcttctgcaccacctccttcgaggacgcgtccaccgtgagcttcttctggacgctgcacttgttgcacgtaacgcggcgacagatcgagcaactcgacggagactggaggaagccgagattcttcagcgacctcttgcacacgccgcagtctaccgacggcaacgcgcgcgctgcatcgctttggcggctaagtgacgccagccagcttagcttcttgagattcgaacactccacgaaaccagaacagtttgcgacgttgtgagccagcttcaagacgccgtaactctccggcacatcgccgcgagggtcgacgaatcctcgacaaaacaattccacgctggcagcgttgaactgccgtccgatgtagcacgtcgacatctgcgctcgaatgacattgcatcgcttctccagcggagggcagtcgtccagctcgatggagtggatgaggttgtagaaaatcttgtcgccgtccgagtcgtaggccatccccatggactcaaggtagagaaagtctcgacgcgtcgtgaactccccgttgcccacttgatcgtcacggaccggaaagggtcctcttcacttggtaattgcagcgcggctagcacttcgcggtggtcaaaggcgtcgttgtgaacgtacgagttccgcacgatccacgaatacttggtgttggcaaacccgccgaaggctacatcgtccacagtgccgtcgatcacgcccacagccacgacaagaggaactttgggaggcttcaccttggacaactcgtagtcgccgtctacgtgtagcgaggacgaaccagacgagctgtccttcaatttcagtgctgagtcttcaacgttgtagatgtagggcctaccggaggcctcgcgttggtgccgctccatggacgaaagcgagagaagtctgggccgattgcggattgtttcgtcttgtgtatattagagttgagctttcgagggcttgtcgtgtcttgaccgatagacgtgaactttctccttggacttgacgtgcttccactggcagcttggcaattctcggccgttggtgatgaatgtttcgtatgtctctagtgtttcggcaacgatcccgtcagccatgtcggtcaggatctgttgctgtttgtcggacaagtagacgcgttcgggcatgacgcctggggtctggaagcttttgggcatctcggcgttgatgtcacctccccgaggaaagattgagagtgacgggcatcacgaatgagctctcgtagcgagcactggtggatgaggtgatgactggcgtgtcggaactcgccgagcaagttgcggcgtttgagcagagaccgaggcaagacagcgcgtctttgtgattcagcggtcccgttagggcatctcggtacgaaatctatcgacatcccaggcttcattaattgctctacggctcccagaaaacgagttctgttagtcagatgcagctccagtttgtgccgctcaattgcgatgagtgtcactggcaacggcgactgccctcgtcgaacacttgacttggccacgcgaatccaagcttcatcactgttggcttggaaaggtgtaatcagattgtttgcagtcgcccgcccgcccgcccgccagcgtgtagcaataccagagagatttcccgtgtctcttcgccgccgcccacagtgacagcatgaagccgacgcgtacatgtaggttatagtacttttgtgggcgacgcaaccgtcgactgcgcgctgcttagcgccgagttcatggatacgttctacggatttgtctatgccacgactaggcttcaagggcgcactgtgacgcagcagcaaaacgaaatccacggctacatgtatattgtccggcggcgcttctgccacgctgacagaagatcgcggccagagcagagcagctctcttttcgctagtacagcagccagctgttgaagtcgccgcacagttggtgtgagttctttcggcgatgagtttacactaccgtacacgttcagtacactgtagtgatgaagaacgatccacctctctacccactgtttgcaggagcgaaaggagtgggcagcttcggcttccgcagcttacggtctgcaacatcattccgaactctttgtgtcggtcactaccgtgcaactcccttcgcgagagcgttcacgccgccaacaagtcgttggttggcaacgagctccacgagataagcttatcagctacctcggttacgaaatcgagctgcggtcagtcgctacatcctcacgggtgaaggcgacggcggtaaccagcctctgcccagccacaacgacaacccgagaccagaatccaaggggaagattcctgtcgagtgcgcgacgaacggcgtacagtacagcctacattacagcagattaatgtccgcacgcacggcttgaagcagctgtagagtcgccggtggcgcgctgcgtcactcacagtgaagcttgcggcctcgcgaggtccatcgcggcatcagcgatgtcgtgaatcgagcgatcaggcgcgatcatctaactcatagatcattacttctcacaagtaccctattcgactcatttgagctcaaaactggcagttaaaaaccggcctcatctagctttgatatgcaagataaaatatttcacaggtcagaaatagcagctaaaacgcttcattgatatgcatgataaaagatcccacgatcttgacacgcttccctcgttgttcagcttatcacaatcgaaacggagccgacgcgtgaggcacaagtcaattgccacggctttaaacactttgcgaccccctcccccttcggtcttccgatgaagttcacgctgccggacggcgtgttcccagccgtgcggctgtccacgagccaccaggacgcgctggtcgacgaggccgatacggttgtggacgaaaccatcgccgcgaacgaagcttttctggcccatggagcggcgctcaagagcaccaagtggcgactcgttcgcgtgaaggaggggctgcatgtgtactgccgacgaccgacggcgtccgacgacggtcgcggtccggaagcgtcgccgcagacgcattcgaggacgtggacgacggctgaccgccctacaagacacagagctcgggcaagcagcaagcgacgtggggcggctatagtggagccactgtctccgtcctctgtagccgccgagaacagcatccaggagcaaatgcggcgtccaggcgtgtcgctcatggtgctgcacggaaccgtggacggaacgctggacgactcaatgtttggagcgttcgcggctacggaccaggcgtggaagtggaggagttcgcacgtgaacgaccgactggatgatgcccggattctggcaaaggttcgaggacctacgaagcaagaccccttccggtttctcggtatcaagtggttcgccaaggagcacccggctgtgctaacgggaatcctccagcggcgcgactttctcatcatggaggcgacggggctaacgcaggattccaagggggagaaggtcggctactttttgatgcactcagtggcgcttcgtgcggctccagagctctcagagctcaacattattcgcggagagctgagtttctgctttattcttcgccagagcggccacggtaaagtggatttgtactgtcgaggctttacggaccctcgtggggacatgatggagcgcgtgtcagtcgcgatcgcagccgaagcgctgatctgcgctgccggcgttgtcgactatgcgaacgtcaagaagcttacgtggctgatgaagcacaagagaaagagccagcaatgccagcctggtgaagaagctcggtctgggcgatgcgagtcctgcagcaagagcttcaccaagtttgcgttcatcgcgcttgcgactggggctgcaactgcagggaaaggtgccacctgccagatctgccgtcgagtggtgtgtgccaagtgcagcgtagtcaagaaaatgaccgtggacgtgtcggatactggagcagtaaagcagtgtgccctccgattctgtctagcttgtctccttgaagcgagagaaaagtctgcttgggagatggcgctgaatagcctcgaggctgaacgggagtgttcatctacacgccacactgcaactggatcgactccaggtacccctcgctctcagttcggctcgatgcctcgtagatccaatcaccgacgtgatggtcggacctactcggagtatcaacgtgcaggcactcgcgtaccgccagggagcgatggtcacagatttcaggcaaaccgacaatttggagcagccaaatctttgcaaacagcacaaaaccagtggaaattcgcggacaagtggccgattcatgcctgacccagcacaagtacaagctgccagtgctgacgggaaatacccagctccacttccttctccaccagctaccagcgatgctgctacacagcaatcgggaaggtggccaagcgcacgcatagcataaggttcctacgcgtagctagggaagcattggatgcgcaacgtactgaaaggcctaaactataaatttccgcggccctacggaagcataaaaatcgcgaagaaatatacatgtattatgaacaaccaaccgaacagcacatgtatgtaatagtgatcgcagcaacccggcagtgtttgcactattgtgatcgtcttcacggatgagcggtgtgactaatgagaaatttgtgggtacatgtacgtgtatacacaacgcgctatcgacattggtacatgcactgtaatagttctcggtgtggctgtacgaagggcgcttgaacaccacgaagaagaggaagacgagttcgtgtcgtctcgacggctcctgttacatgtactccagctccagctgtcatttgagcgggcacactgcggtgcatgtagcccccttgtgcgtgcaaatacttgaagataactcatgttgccgttttgaagtcttcactcgcggtaaacttggtgaaatggtacagtatgttgtatgtatgcaagacccccggcgcggcaagccctatgcctcatgtgctgcaatactagatattaatagcagtacatgcacctcgaacaagcaacagcgctcacagcaacgtacttgtccggaagatagtgtacctgcttcgtatcctggttacataccggtagatacatgtacagttggcgctcgtaaaatgtgcatgtcctgtaccgccattttacgagcgccaactgtcacgttgaccctaactcttcgctactgaagtacttgcttcttgtatcgagcggttttgccgaagactcgcgctgtagcgacttctgcattgcctggagcctgcactgtacgctgagacatagttgcagtatttttcacgactggccgcaaacagtgagatcggatacgagctgtgaagcgcgccggctcgataacacagaccccggttggccctcgcaccgcgagtcgcagtggggaggacacaatcgtttggcgttcaacctccaacttcgtgccgaccggaagggaaggcgatgaagttcacgctacctgaagatacgttcccagctgttagtctgtccaaggagaagcaagctgcgttgatcgaggaagcagagaccgtcgttcgccagtccatcgcagccaatgaagaattcctggccggtggagcgacttttcacgattcgaggtggaagctcgtgcgcgccaaggaaggcctgggcgtgtatcggcaacgacgatcgataactgaaatctccagggactcgtacaaggtccagaagccttcgtcgcctccgagccagagctcgtcactgtcctttaagcgtcgaggccgcgccacgagcgacatgcactggacaacgaccaccactgaagaggggtcctcaatatctggcatcaacgagagcagcatccaggagaagatgaggcgtccggagatatcgttaatggtcatgcacggaaccgtggacggaagcctggccgactgcatgtacggcaccttcgcgcctaccaatggagcgtggatgtggcggtgctcccatttgaatgagcgcttcgacgactcgcgcgtcctggcgaacatcagaggacccacacgaaaggaccctttccgatctctcggcgtcaagtggttcgtcaaagagatcccggccgtgctgtctggcatcgtcatgcggcgcgactacctcgtgctggaagccacggggcttgcccgcgactcgagaggcgagacagtcggctactacctctgcactcggtctcactgccaactatcccagtactcactgacttgggcatcgtccgcggacagttgagcttctgcttcatcgaccgacaaagcggtccggggagagtcgaactgtactgccgcgacttcagtgacccgtgcggcgggctgatggatcgactgagcgttgccattatggcggagtcgcttctctccgctgcgggggtcatcgacttcgcgtacgtcaagaagctcatgtggctcataaagaacaaggcggtctcccaccaatgtgtgttggggagcgatgctggagctactcgacgagacctgcgacaagaactttaccaagttcgcgattgccggtggcgcgggcccgggagccccgtgccacatctgccaccgcgtggtgtgtgtggcaagtgcagcgtagtcaagaagatgaccgtggacgtgtccagcactggctcagtcaagcgttgctctctccggttttgccgcgggtgcatgctggaagccaaagagaagtcggtctgggaattggcgctgagtggagtcgagacagcgtccgagtgcagctcatcaaccaccgattccgagtttgtattgcctcgcgcttaggataatagctacaagagcgacgaaggggtagttgccattcttattaaccgcagacacatgagattgagaagtaaacgtattgaacctcaaggaaatgactgggtcagactgtcgacagtattacatgtacttttgcgtgctttctaaacgagcccaatccgcgacacatgctgtagcttcgacagtccagtggagcccccactgggggttcctctcggtgcctggcgtgtcaccacgattcctgcagtgatgagaatcccattcccattgagatagagagaagatagtctattgaaccttagttaatagcctcctgaaactttctaagtcttttgatcagcgctgactccttcctcttgagccacggcgctggggctggaggtgaatctggaggttcagcctcaatcgtgatggctacatagcaatccagagtgagctgtagccgaagcccatttgtcctggttgctggcttgttccgtccactgcgtgccactgctgatatttgcctcagacagctggcccacatgtattccaattgttgtggagctctccatttctttccttcgtggacgacttggtttcgaatttgccacagcagtgcgtatcccatactacacagactccaccagatccgtccgagagcgtcttcatagtctttgttccatttaccatagcattccaaaagcacacgccgcattctgtcactgacaggaggagctacccgtgacgagatgtaactcttacacgcctcgagacgactgctggatatttcatggccaagccaatgctccacacaacgactccaaaactgttgggctcgctcgcagccccatgtaatgtgcgtgatcgtgaccttgcctgccgtgacgtcctgggcgagaagacagccatccgtcggacgctcgccttcgtaatgcaaatttaattgttgagcggccattcgataggccacccagacctggtagtttgtcaacgtgtttcgatgcgtccaaagctgttgcggtagttgactctggagacctcgtatccagtcatctcgttcacttcggacttcccacgtcgtgagcagcttaccgaggtcgggactggcgtgtacccgaagctgtttcttaggctgcatcttcaaatcctttataatgtttcgatttcgggtccttgctggtacttgccaagggaatccgtgaatccgggggtgtgcatgaaagactactccctccaagtgcttggatagtttcgtcgcgtcctttttggcattgcgctgcgatacgactttccaattgagcccgttgacttgttgctgcagcgtgattgtagattttcctgcattggggactgccaccacaatagaatcagcctccactgaccagacgtaactttgcgtgaggcgcggtggtttccgtaattgaagctgtggggctcgaccgagttgttctcccacgtcaattcggggcgagtggagcagaatagcgatcaaccatcgctcccgtttggcgatggtgtgtcccgcctgacatcccggtgctgttggtactcgtaccgtgtaggtcgttctgtgagtcctgacgatttcaaggctcgcgatcgaggctaccgcgattctgtcgtatttggctcgcgataacactggcttattactatctgggatccacgggttatccgcccatgcgaatgtgccccagaacgccgtgagctccggtatttccagtcggtttgacggtagacctcccaaatccacttcgacggtgattttttcaagcgatcgggggtggtaggtcgcgctattcgcaagctgtccggctacagctgccagtcgtggaacatacactgccgataattcctggcgttcatgctgttcagcttcggtaggagctagagcggcgcagacttctgtctgaaagaggtggcggcgactgccccccgtcgattgacaacggcttttactgtcctttcgcggtgtcactgctggttcgtctccgtgaaaacccatccatgcaagccatgcctctcggtagacatcatgccgactcagtagccacagcattgatattttcacccgttgtgcttggatcgccacgggcactgatattagacccagcccaccggcttgcttgggtgtgaagatcagactcggtgttagcttgtgtcgactgggatcatctttaagtagccgccaccacaagaactgcttctgcatgttgactaagctcgtcaaaacctccttggtaggaggacacatttttgcaggaaacagcaccgcaggcataacgattgcgttgaaaagatctaccctggcgcgcactgtcgttgctgcttgctccgcggttgccattcttcggtgaatgctgcgaatccgttgggcccaattgactttgctgagatcgctgaaacccacgtcgtacccgagatagcgaactgtgtctcccacaggtagtactggaattccgcaccagttctccgctaatatcgctttattcaagaaaatatacttactcttggctggttgcaccttgagccccgagatttgaccaaagtgttcgacgattttcataacccttggtaactggccgctcttcgctaagaacaccgtggagtcatctacaaatgctgagaatttgtgctccccatgacgcgggctcagatgctcatcctgttgaagcgccagcgcaaaaaattccgccgctaagatgaaaagtagaggagctagcggacatccttgcctgatgcccgatttaacctctagcggcgaagaatactggccgttcacgaaaaattgtgctgtggttccttcatgcagtcgagccatgagatcaacgaattccggtgcaaaaccaaattgacgtaacacttccaggagaaagacgcggtccacagtatcataggctttggtgaaatcaagaagtaggatccctgcactgtccgacgcattgataaaggcgtcataaattgcattctccagttgagctagcatcatcaccacggaccggtccatttgccggccgtgaacgagaccttgttgagtctctccaatcagacggccgagaaatctttgaagccgcgttgccaatacttttgcgaacagtttgtagcttgtttgaaggagtgagattggacgataatctaaggcgttcggcgagtctctctccttccggagaggcactaccacggctttcaggaaggagtctggtggggggcttccttgtaggagatcgttacagacagtcacaagccgagggatcatcgatgccgccagatcgaggtagaaatcgttgttgagcccaccttcacctccagctttgttccgttgaagatccgccactgcggcgagcaggtcgtcttcggtgataggagccagaagccgcttattgtcctctacttgcactcggctctcgaggggaacgtgaaaatcgttctggtatagcgagagattcgtcaaaggtttcccctgacggagcttggatagccgaaacagtttgatcgcgtttccagactgccgttcgcttaaacagccagcgaatgtccgcctgagttcgttcgagatgtcttccaaagcgagcagcactgcggtcccgcacatcttggaccaatgcggtcaggagttgcgtgcggctggtggcgttctcacgcaactgcctctgcagcttattcgacttgcgccttctgcgctttttctctcgccgagcgatgtgctttatggtatttcgacattgcttgatccaggtgtaccagctgagataaccaggaccccgttgtggcgccttcccattgagctcctgtagcagttcttcaattagacgttccgagtgcgccccatgaatggggtaatgctcgtgaggtgctagctccaactcttccagggccgacccaagttggacgcgagcatcaactagtctcgattgttggacgatccgggaaagagttgcgctttccgttttgtcgattcttgtcccgcctcgtcgatcgagtaccggagactccacgcagttaaaatcacccgccaagatgaggttggcggtatgacggggcctccatcattgtaggcccgtgaagaaagattctctagccccttggttcgacgccggcgcatacacattcagcatgtgcatattttggaaagttactccaattgcccgctcgttacaaagctgctggttccaaggttgaagcgcggattggaactctggaaaaactaagatgcccacccctgccgttttctgcggtgctacactccaatatgacagcgaaggctgtccaggcggaagactccacatccgattccatctctcctcgagctcagcttgctctttcttagagctgacatgcgtctcctcaagaagaattagcgcgggccgttgagctcgaggaatggttcgccacgctgacagccactcccatcggttgatagaactaaatccttggacgttctgagtgatgatcttaatatcggtcgctttcgagagaggcctcacgtctctctccgtctccgtgtggaacgtcatcaggtcggagaaagcactccggccataggcatcccacagaggcccccctgacaccgccaatttcgacatggcgatgcctttagtactggagctgtggtgtcatggtcgtcagctgattctgatgcgaaccatctccatcgtcaaccacgtgggccatgtaccgtcctattgctccccatttttcggtcatggctttgtcatttgtgaggaatgcagctttgaaggtcgggagcttgcgaagagcggtcaagtgtcgttgaagcttggtctgggctgagtcatcagggtgactgtcctcgccaatcattgcggccaccttctctgcgtaaatgtgcgcaaacaataagtagtggcttaagcgagatgtccgcgatggagcacatagccacatgactacgtcccgcccatagttttccgctttttctacgtcccattcgtcggtactggtcataatcgccttcctccgcttgttatcaactgcgcgctctgctcgaagccccactgcgcgagacggcggactcgggtcggatctgttttctcatcctgctgtcctgcttcaatcgccgtctgccagcattcgtctcgccaaggtgaagttcgctcgtccagcacttgcggggctagaagctgcactatttcgtggctgtgaccgaaggtgcggagcaggtgaaggatatagtctcgttcttgcttggctgccgccaaccaggtctcaaccgaggcgtccaccgctggaaatggtacgtcagaacgctgtgcccattcgcccgcgtaagcactccaaaaatttggccaacttggcataccttccggagtactcggctgtggcaatcggctgggactgtcaacttcttcgaacatagtgagcagattcttggttggatcgtcactatttcgctttttcagcggcacagcccggttgttaacattcaccactattccatcttccacacgacgctcaaccggagtagttacgtgcgcccgcttaccaggggctgctggtgaggaattacgcctgagtattcgccggggtgtagtcactcgggaagtagataaatcgtcggagctctgagtcgacgaggggtagtaatctggaccagcttggtcctgccccggtgactcaagctccgtcactggctgattgtctccgctcttctcctcctcgagacgttggcgccactgccgaacccctgactctgggatttgaaattcgaccatgtatttcttgcactgctcgggatcgcttaagtccgctgctagaagccgtttttgctggtgaagcgacagctgcgacaccgtggcaacgagaaaatgtagtaactctagggtgcgctcgccgccaactcggagaatctggtcaatctcttgcttgagcgtatgatgaattgtcgggccgctcagcctttcttctacctcctctaggttgccgctccaacttctgggtcccatggtgactgggacccgtactgtgactcagcattcggctctgcgtcctcttccgtcttcatctcctcattccaccctctccctgctttagtctcctgagggagatcacccttttcagccgcttgtgcttccgtggctgggtccgtcgtctccgtcgcacttggccgcctagtttccaggtccccatcgtcacttcctgccatctccacgtcctcctcgctggctccctcttcagctgcgatatcttgagccggagtactgtgaacgtaagcactatagtgttgattatggtagtgaagaacaagcggcattttgtcgtcgtttgacctcgctttccgtttgagctcaatgactttcttcacacagccttcagcagagagtggaaactctccgaaagtcgagaaatcctttttgttggcatggcgtgtttccggttcataatgaagtgcactccagatcgttttgccaggcacaaagctgatgacgaagatgtctcgttgcagcatgattccataggtagcgagagtgttattgctgccccaaagcttctcgggcaggaagacagcggggtccgacgagctggatccatactctgtgaggtagcgtcggaactcttcctcggagactggttgtgtcattttctcgtagccacgtcggagctgtattagcgtctgcttccgctgggcatgtgggtatttcagcgggaaatcgatgaaggccctcgccgcgcatccttttttcaaagccgtggccgcttgagcaaggcgatccggggtgtcggagaagctgcagctcgctaacgcttgggccaccgagtagactggcagtttccggatctcggagtggatactggtcggaggctcatagaaacaagagctcgcgacagagacttctctagtgcttcctcgccgtgggttttcgcacttgttgctggcgggacgtggtctcgctcttgcgtcataggaaccggagcaagagcaacggctagctctgctaaggcagcatcttccactaccagtagttcggcgtgggctttacggattgctttggccgtgggtttcggcttgttcggttattctgacttcttctcgtcttcttgggacgcctcctcgtcagccgactccacagtcagcggattgaatcgcgacccagctttagcgttttggtgcgcgtcactcacgggccctttcttcttgtcaggattcggggtcttgtcagcactcttagccggcgcaggtccttgctggactgggaagtttgcttgtgggtgattcatcgtgacaccgctactgggtttcttcgttgacctaccatcgaaccagccctcctttggttccgcagctgtggtacctcgcgcccctctgtggcgctgctgtactgggtccgacgtcgccgccttttccggcagtggatctgccccgttggcgcgatcggtgccagacagctgtggctcctccgactgacaacctgcggtcaccgtagctcaaggctagtgaatgtcggcgtctgcacccgtaagctagcgaccgtgtcctccatggctacaagacagcctgggcctcggagctcgtccatcgacatgtggcacgctctcattgggtgcccgagacggccgcagcgaagacactgctgccgacctcgcatactcggatgctgaacaacaatgacagaggtgaaccacacaatccgcgtgatcccttctagttcccgtgggcagccatccattgcaaaactcatttccatgccattgacgtactcgattgagggccactccggtccaggtcctcgaagacaaacggcacacggagaacgtgcttcaaaaacgcgtgtagacggccgagatccatgttccgcgtcacgtcacgtagaatgacgacgtactctgacgccgtcgagatcagggcaccatcttcttcgtactgcaggtcccaaacatttgccccaggtgtccgtcttcccacaggatgcgcattgactagtttgtgcgtcgttcgatggaaagttacctccagcccgtcaaacctacaggctgcctctctggtaaagaagtagaaatgaatctcgtgcttcgctgcgttgtagctgatcgtcttgacggcagccaggagtccccagagtcgttggttgttagtgctatggttcatcgccgcgatcgaaatactctcctgtagacttttggtgctctgaaatgcttccttgactggcagctcaccatcaaggtccataatcagaagcccctccacctgcgctcgcactgtaccgataattctcaacttgtcttctgttcgcatgatgcggttgaagaactgcggcaatcgacggcagataaccgtgccctcaactaatccttgaacaattctccactcgtcttccgttccttcccggaatgcccccttggagtacttaccgtacgttttctcgcatacctgccggagccgggtggtttcctcggcggaatacacactttggttgaacaggaaatctttcgttgtaactccaacttcacctcctccttcctgttgccccgccaccttttgagcccatcgggtgagcactagagcttggagctctgcagtttgcatcgagacctttcccaactccttgctaagaacatgttccaacgactgcctggagatgtagaccgtgtgacatgacgccgacacgagtcgagaccatgaagtccagtcttgatgctggtttaccacgatgtcttcgaaaacgtcgaccagccgctccatctccggtttggtgaggcgcgggagtcgttgagctgctggagacaggttcttcttcttgcttgggctcttaggaaaaacagagtcaaagagctgctgcactaagtccagccatgcctggggtcggggtttgcgataggtggcggtttgcagcgagtgctgaagcgctgcagccagctgctccgctgtcgccggctgcttgctctcttcctccatctctgccttcttgctcgtttcagcctgctggtgactgctcatctcggcgacttgctcgcggcggccggaggtctcggtcgtctcggggggctccccctcggttcgaagcggtgggggcccgtcagatgccacctcactcgccctcccttcgtttaaggccgggtccaaaccttcatgctggcgagttctgtcgttcgtcatcaacttgctgaactcgttcctttccgccggaaagtcgtcttcctcctccggctgagtctcggggacgatctcgtccggtggtctcacctccgtgtccacgggtgaggtgccgggatcgtcgtccgccgccgggacctgcccagagggccgtcggtcgtccgagtccgtggccgaagccgcagaggacatggtgatgaacactttgacttaggttaagtgtaccaaatcaggggcactgtgcacttccaatcccaggatcaacgcgtgccgagttgctggggcttctgtcgcaaaatcgaaagtgtcccattcccattgagatgggcatgcctagtaggtcttgcaaacggtgctgaccgcgtacccgtacccgcccgtgcagccgtccaagccgaagtcgggtatgttgtcaagactgatgtgacgacgcctcgccaagcgaccgtgtgacgcgaacgcgtcatcagtgaggttggcgtgaccttcactgtgttgtaccgcaatcattcaggtgattacgggacgatgattacgtcacggtgattacgccatgattgtgggtacaggattgtgggtacaagatgggcatcgacgtggcgttctctgattggataaggtaactgtgtatccagtagagaatccagtagggtgtatccagtaagaggtatccagtagcaggcttagaggtagcacgcggttgcgaactaaggacctgaatcgaatcactttgcattttgccaactactgctcaagtgctcttccttttggttatgagcccaagccccgtcttccctgaccaagaccccgactacgccttcgccatggacgccgccccgaccgcgaccgcccgcatcaacaagttcgacggaaccaacttccacacatggaagttcaagatgcagatggtgctggaggagcgcgaactgtgggaagtgacgagtggggaagtgaagctcgagcagtgcacgaccgcggcggaccaagcgacgtttcgcaagaagtcgcgcaaggcgctggcgatcgtctgtctcgcgatggaggactcgcagctgccgctggtgcggtcggcgaaggacgcgcatgatgcatggtcaagactcgagggacacttcgagaagaagagcctggcgaacaagctctttcttcgtcgacggttcttcacgacaacgatggacgaaggtgatgatgtgctggagcacattaacaagctcaagacgctggcggaacagctcgacgcggtcggcgctccggtcagcgaggacgacttggtgatcacgcttcttgccagtctgagcgagtcgtaccagttcctcatcacggcgttggaatcgcgttccgacacgctgacgtgggagctcgtgacgtctcggctcctgcacgaggacttgaagcgcaaggaacaaggtggcggtgctgacggaaccgcgcacgctcaaggtcaagcgttcatgacaagcgacaacgggaagcgcaagggacggcaggcgcaagcgcagaggacgagcgcctgtcactactgcggcgagcacggacattggatcgccaagtgtccggtgcggatccgcgagaacggggagcggcagaggccgcaacgagcgaacgtcgcgcaggtctaagatgactctggcgacttcctcttctcggttggtggcgacacgggtgcctccaagctgagcggcatgtggctggtcgactcgggtgcgacgcagcacatgacgtactcgaaggagtacatgaagtactacaagaagatctctccggtggacgtgcatctggcggacgacggcgtggttcaggcggtggggagcggcgacatcgtgatgtcgatgcagacaccgcgcggcatgaagaagggtgtgctcacgggtgtgtgacacatcccgaagctgtcgcgtaatctgttctccgtcggccgcttcaccaaggacgtcgggccagtgaccttcgagagcgacgggtgcttcgcggaaacgaagggtctcaagtggaagctcggcgctcgcgaaggcaaaggactgttcaagctctgcatgacgccgaggacgcctgctgacgaggccaatgcggcaagctcgaagaatcgccaaggggacaccacgtcgtacctctggcaccttcgacttggtcacatcggccatggtggtctcgacgccatcgtcaagaagggctacggcactggcatcccaatgacgtcggtgaagcagtgggaggtgtgcgacgggtgcgcactcggcaagcaaacgcgagtaagcttcatgaagtcgtcgccgaaccgtgcgaagcaagtgctggaggtggtccacagcgatgtgtgcggtccgatgcagacggcgacgttcggaggtgagcgctacttcgtcacgttcatcgacgacaagtcgcacttctgcgtggtgtacttgctacggaacaagtcggaggtggctgccaagttcgctgcgttcgtcgcgttggctgagacgcagaccggcaagcgagtgaaggtgcttcggagcgacaacggcggcgagtacacttcgggtgcgatggccaagttgtgtgcggatcgcggcatcgagcagaagttcacgccgccatacacgcctcagctcaacggagtggccgagcgaatgaatcggacgctggtggagtgtgcgcgctgcatgctggagcacgccgggttgtcgaaggagtactggggagaagcggtgatgacggccacgttcctccgcaaccggtgtccgacgcgcgccatcagtcacgacaagtcgccgcaccacgtttggaccggcaagaagcctttgctggccaacctcaaggtgttcgggtgccacgcgtacgtgcacgtgccgaaggagaagcggtcgaagttcgacgctcggtcggtgcgctgtcgtttcctcaggtactcggagcacgagaaggcgtatcggttcgaggagatcgagagcggtcgcgtgttggtgagccgcgacgcgcagttcatagaggatgtcttcgacggtgggagacgcaactacgcttcgaaggaggtgttggtgggtcttccgacagatgatgatgaagacaccacggatgaagagactcagtccggatcagacgagaacagagaagaagctgcgcggaatcaagactttgaacccggcagcaagcgacacccgcgcacgcagtcgctcgaggaggccgtggaggttccgagtgccaagcgatatgcggtgccgagacgacagcagccgctggacgagatgtctaccgcagcacaagagaaggaagacttcgaggctgcgtacgtcgtggatttagtgggagagatgccgacaacgttcaagtcggcgatggaatctagcgacgcagacaagtggaaagaggcgtgcgactcggaggtggagtcgctccgcaagaacgagacgtggaccctggtgcaactgccgaagggacgcaaggcgatcggctgcagatgggtgttccgcgtaaaggagaaccagtctggagagatcgagcggttcaaggcgcgactggtggcgaaggggttctcgcagaagtacggcatcgactacgacgagacgttcgcgccggtggccaagttcacgtcgattcgggtgttgctgagtctggcggccaagtacaagctcacagtgcaccagatggatgtgaagaccgcgttcctcaacggcttgttggacgaggacatctacatggcgcagccggacggatatgtggacggagatcgacccgactacgtgtgccggcttaagcgttcgctgtacggcctgaagcagtcgccgcggatgtggaacaagatgatcgacgagttcatgttgaaactggggttcaagaagtgcgagtccgaccactgtatctacttgaagcgggacaatcacgacatgatgttcgtggcactgatctggtcctcgccagcagcagcgacgggatgctgaaggacacgaagcaggcgctgagtgaccggttcgagatgactgacatgggccagctcaagtacttccttggtatggagatcgagcaagatgtggcgactgggaaggtgtcggtgcggcagaccaagttcgcgaaggacattctcgagaagttcaagatggatgagagcaaccctgtgaagacaccgcaggatccgggtctgaagctgaccaaggccatgtgcgagggaggctgcaagcacgacgagaccaaggcgaatgttccgtaccggaacgccgtgggctgcctcatgtatctcatggtggggactcgtccggacctcgcagcggcagtgggagtgctgagccagttcgcagcggacccatgtccgacagactggcaagcgctcaagagggtcttccgctacatccgaggcacgaagacgcacggcctcgtgcttcaagcgagcagcgaagacggactgcaaggctactcggacgcggactgggccggcgacatcgagtctcgacggagtacgagcggctacgcgttcatgatgaacggcggatgcatcagctggcgaaggaagaagcagcgcacggtggcgctctcgtcgacggaagccgagtacatggcgctgtcggaggccacgcaggaggcggtgtggctcaaggtgtttctgtgcgagctgggcgagatggcgagcgatgaagcggtgaagatctacgaggacaaccaaggctccatcgcgttggccaagaacccggagttccacaagcgcaccaagcacatcgacattcgctaccacttcgtgcgcgagaaggtggaagacggtcaagtggtgttgcagtatgtttcgacactcgacatgctggcggacatcatgacgaagccgatcgcggcgccgcagttcgacgcgctcaggacgaagctgggcatcgtggtcgctgacgagtcgagtgggagtgttgtcaagactgatgtgacgacgcctcgccaagcgaccgtgtgacgcgaacgcgtcatcagtgaggttggcgtgaccttcactgtgttgtaccgcaatcattcaggtgattacgggacgatgattacgtcacggtgattacgccatgattgtgggtacaggattgtgggtacaagatgggcatcgacgtggcgttctctgattggataaggtaactgtgtatccagtagagaatccagtagggtgtatccagtaagaggtatccagtagcaggcttagaggtagcacgcggttgcgaactaaggacctgaatcgaatcactttgcattttgccaactactgctcaagtgctcttccttttgggtacccgtacccgcccgcccacaagccacgggtgtacccgggacaaccagggctcaaggttttgtacggacggaccaactgttacatctcccgacacggttttaaagttaaacatttaagtaggaactacgcgaaatcaatacagagtgaaaaggacttgtggaggctaaaagaagacggcgtaggagcatgatatagctggtataagtaagaaatattactatttagtactattttcgtcaacttcgggtatccgtggcaccgcccgaggtttgcttcgggtacccgtacccgacccgaaaccgggtatacccgaggcgggtagagcgggtacaagaaacgggtacccgattgcgagccctgatgcctacattgcgcaagggaacgttagtttcacacgttgacagacgaagccctccgtgttcagatcggacacctccagaagtcaaacagcgtacggtactccgtagtgtactgtacaacatctgcagcagagctgaggctctgctcgcctacttcgcatcgaccgccgaatcggcggcgccgatagcgtgtaccgtggacttacacgtgcgcaagaatccctcaaagtagccggcgctgtactgtacctctagatcgcgaagatcccgccattgaccaagtaagcttcgacgtgacgagtcgtttaccgccaaatgtaccacttgttgactcaacttgaccgtcaagcacaaaacccaagtttctgctcgttccttccttccttcctgccagtactgtatgaccaacgaattgacttcgatactacgtgaacttttaagttcattagaataccaattaaaattggtattctgctataccggtaagtgtagcaaacaatgcaaatgcatggatttacatgttaacacattcagaaataatccaaatttttgtacagaacgctgcgtgaataccgaacgcctgatatatataagggctctagatttataaagtaatctcagctttaccagagaaaaggatgtactgaattagtttatcttagacggaatttgacgcttgcttagttaatcaaacccgagtaaagcagtgctgagttgtttcagcgctgaccttcgaccaagcgtgttcgcaccacatcactgcgattagtagctctactttgtactactcgtatagggcttagcgggtagtgcgccaatgtgaaagtggaatcgtaaatacagagaagatcgcacagacaatcaaaagggcgccaattttcaaactgcacagcttagtactttagccaaacaaaggtatcctggatttttacatcagtaccttggcccatctccgttcgtcctgttgttggaccttgaagtattatttatatgaggttatgtattgtatacccgttcggtattgaggcagattcctgtacacacttctgcaaataccattggaactgctacaaaattgacacaattgttcatgacacaatttgtggagacgatatttgcgtcttcgcatattgtactgggtaaactgccctatttttgggttgtttttggaagagttccaatggcacatttattgatacacgtactgtacacatcaagcacttcgttactttgtcgagctgcctactgtacagttattgcactcttcgctttatacagaactcccctgcttaccctcgcctgcataaagtttggtacctcgcacagatagtacaaatcactgttgtcagcataaattcaccatatactgatttaactgaaaacgggagggaaagtgtcgagtgcgggaagcttacacaatagctatgcgccgcaatgttgtaataaatcagtatgtttagcctcctttgcaattctcttagccttgcaagatttattggtcccacctttttggctgaggcggggagttctgtagttgattgaaggacgcacatgtactgtaaaggtccactgcacttgaaactaactttccttttgtgccgactttacctctgggcaatcatggatatagacaaccctaaatctgtaacttacatctgccgaaaaacatttgattgacgatcaaacggttttgcagaagacacgggcgtggaaaagggaacgcgactgatttcatcgtgcaccctacacgtgtgtacagtacatgtaccgctccctacgatagagacggaagctttgacggggtctggatggacgggaccagttggcgacacttgcagccttcagaagcgcacaactgttttcgccttcacgaaaggaaggaggggcacaatgaagttcactctaccggaaaacgccttcccggacgtgcatctgtccaaggagcaccaagacgcgcttatagaagaagccgagaatctcgtgcgcgagacgctcgcagccaacgaggcattcctggctgacggagccaaatttcgggatccaagatggcgactagtgcgagcaaaagatgggttgaacgtgtaccaccgcccacgatcgcggcaaagaagctctcggagtctacgaatgcctcggaagaaggcgttctcaccggtcctgctaagccaatctcaagctacagacccgtggggggtcagccagcatgaccacgacgaggccagcactgacgacgaagcatcagcatcttcttcatctactaaagatatggtgaggcgtccagcaggtttcgaaatgatccttcacggaacagtggacggaattctggacgacgcaatgtatgggactttcgccgccacggaccaggcctggatgtggcggagctcgcatatcaacgaccgcctcgacgacgcgcgagtgctggcgactattagaggccccacaaaggaggacccgttccggttcctgggtatcaagtggttcgtcaaagagcgccctgctgtactgacaggtctggtgcaacagcgtgactaccttatcgtggaggccacggggctcatgcgggactcgaaaggagaaaaggtcggctattacttgatgcactccatctctctgcctcggatcttcccggaactcacggatttgggtcttcttcgaggagatctgagcctctgcttcattgaccgccagcttgggcaccacaaagtcgagaaatactgccggaacttcagcgatccccgggggaaaatccctgatcgagtggctgttgcgatcaccgcggacgcgctcatctgcgctgcgagtatcatcgactacgcgtacatcaagaagctcacgtggctcatgaaggagaaaggggaggagattgcggcgcgtcatcgtcgaccaagtggcgaggcgcgacccaaatgctgtgaaaactgcagcaaaagcttcaccaagttctccctgcctggggctcgatcgggtgtcgactgccagatctgtcgacgagtggtatgcggacgctgcaacatgatcaagaagatgacggtggacatatcggagacgggcgctgtgaagcagtgtgcgctgcgcttctgtctggaatgcattcgggaggccaaggagaagtcggtctgggagatggccctgactggcgtcgagactgcatcagaaacgtcgtctgcatctgcgtctggctcatcgcggtcgggacgctaccgataagtaagacagagctacagtggcaagtaaaggagtagcatctaatggaaaatttatgaaagcacactatcgtttgaaatgcatgtagttgctcggatcaactaagctaaagcctacttaaaaggatcagtcaacacaataatatatatatttctatccacccatttttttgcttttgttcattcacaaacactgactaacgtgccgagcaactatcacttcgttgctagcgttggtccacagtaccggcacccccatagcttcctttgcaagtctgatcagtctaatctgggactcgatgaacatcttgacgaggtttcgacaccactcagcgccaattcccagaccgacttttccttcgcttcgatgaggcagccgacacaaaaccggagagcacactgcttcaccgacccagtgtcagacacgtccacggtcatcttcttgaccaggctgcacttcccacacaccacgcggcggcaaatgtggcacggggcccccgatccgacaccagtcagtgcaaatctggtgaaactcttgcagcagttgctgcagtgagaaggccgagaggctcgagtcccgtgttgctgcgtgacccccttctccttcatgagccacgtgagcttcttgacgtacgcgtagtcgacgactccggccgcgcagatcagcgcgtcggacgcaatagctacagacactcggtccaacatcgcaccacatgggtcgctaaaaccccgacagtacagctcgactttgcccgggccgctttggcgatcaatgaagcataagctcacgttaccacgcacgatgcccatgttcgagagttcaggaacttccgacagcgagaccgagtgcatgaggtagtagccaactacttcgaccttcgagtcgcgcgtgagccccgtggcctccatggtgaggaaatccctctgctggacgatccccgacagcaccgacgggtgctccttagcgaaccacttgatcccgaggaaccggaacggatcgctctgagtcggtcctctgacagtcgcaaggatgcgggcgtcgtcgaggcggtcattgaggtgcgagctgcgccacatccaggcttggttcgaggccgcgaaggttccgaacatgcagtcggccagacttccgtccaccgtcccatgcaaaaccatcaaagacacccccggacgcctcaacttgtcctgaacactgctcccaggtggcgaggcctccccgtcagtgtccttccaccgggtgtcgctacccgaatgacctcgacttttgaaggaccaagacgaactctggctttgggaggacgacgaccccggaagtttacccaacgccttgagcccgccagacccagacttcggtggtcgctggcgatacacactcagtccctccttcgcgcgcacgagtttccacctcggatcttgaaaagttgctcctccggccaggaattcttcattcgcagcaatagtctcccgcacgacggtctccgcttcctcgatcaaggcagcttgcgcctccttggacaaattcacaggcgggaacgtgtcttcaggcagcgtgaacttcataaccttcctcggggctggcgcgacgctggattgacttgagcgtcaaatttgttgtgcttgttccacgtcgagtatctgacaaccatccgtgccccgtttcgtcaaagcatcccgtttatcctaggtgaagagcttcacgctgcttgcgctttgtgtctctctgcatagcctgcatttctgtgctgtttcttagccaaaatacttgaagccatgcttgccattcccacgtctatccaagggacccaagcggcactcgagatttcgttcggcaaaaccacttgatgccactagcaagtggtttaacggaatcctgactcataatacttagagcgtgttcgctacgcagctggagatggatatctgcagggagttggtgcatctccatctccacgcatctaggtaaaattacccaatcacagtgcgactcgctctccttctccttactttgctgttcttcgtcggccgagaacactgtgcccgagacaccggacgcgtggcaagatggaccaagctgccgatgacgctccgagagctgcgcctccgttcccgtcagccagtggcgacctcgtgctggctgctgccagtttggacatacctgtctctgatgttgctcttgcccagactgtgtatgcgacaccggccactactcaaacggagctggatgcccgcacttcctcgctggcgctgccgcattcagagacacccagccagctttttgcgctcggagttgtagctgcgtcagcccgcaaccaacactcacatcgccgcgttgggaatcagaagaacaaggccaatactggtgaaacgtctatcgctacgaagcaaccctcctttgcgtggacgactgcagcagctgatgccctgctgcgggttgttttgacacggctgcaactttcttctcaaagctatgctgccgtactttggcagcagcaaacagaacaccttgatctcgtagtaaaccagcaatacgtagaaaagttggcttggtgcagcgaagattgtcttcaaaccaacttgcatacgcggctgactgtagcatgggcagctgcggctgaactgcctcaatctccagctactttctccttctccagctcccagagttggagaaggagacggggtaattctccagttgtcacgttgtgaactaaacttttttgaccaatcaaaagacaagaaatagagttgatgagaggtcatctccatctccagctacctagcgaacacgctcttaggttgacacgggtttctgtgttggccccctcgtaaagaaacgagctctcggaaatggccaagctcaggtcacgagcattttgtatcaataaccctacgatcacttgaaggtttgcgaatgcacagtgtgtaacacggagtgtgctgttctgattcatgttgtcgatcgtcagaagcgtcttgctttttggctgcatgcatttacagtataccgtaacttacagtactggatcatggatgcatcataatatattgtatgaaacctttgactgcgagactctgtgtgtgcttctttctaacagtacttgtagccttctccatttcacttttcagaaacactgcatgtactgtacagtcgatttttgctgtaaacttaaattgttatcaagtagctaggaaaaatatgcacgccattaaattaactggatagatgtccaagcgttgcaccacagcgagacacagggaatatagtgcaattcaagtaccccccccccgcctcacggatttctagaagttttttaaaactttaagctacgagtaacttcgacgaaaccttttgcgaccaccgagaagcaactgagcccacgggataaataattgctgtgaagctcgctctcgcatggtgcccatcgatcgtacgcggcatcaatccatttctcatcgatctccgtaagcttcacacagtacccaccatgtctgacccacttgacgtcacggttttgctcaatagagcgatagcgatcgttcacgcaacgacaatgcggaatcggatggagcgctttccgtcggcttcaatcgcctggacgcgttgggcaagctggacgtatcgcagccaaacgcacaccccgtgtgcatttggcctggaatgtcgcacaccatcacgtgtgtatcctcgtcgaggggaccggcttttcatcgagtaatcgtggcggctcgtcaaggaccgcaaaaaaaagggtggctcgtcgaggatttgtatagcagagtaggttcatcaaggcattatgacggaagttcgccaatgaggatttcggtcgtccatcaagttgctttaccacattgctaggcgaacatcgccgtactgctgttgacgttcagcctgcatgatctttggccaaatttgcttgtacgagtgtttcgcggatgtgcgggaggtctacgccacccgtcaaacggaggagcccgaacctgaagctgccaagtgcgttgatgcagtacctcttcaagagcttgtaagcccaacctgcttttcgtccgacccgcatacactacggccgcgccagacagattgtatttaataatgacgcaacattcaacaacttgtatctgtaagcttactgctacgaatcgatgttgcaaccgtaaaaggagttgcccatattgtcgtcctgatagttagttgaactcgagcgcgtcaccgagacgcgatttgcatgagtagctctgagaccgtgcgactttgcattagcagcgaggtccaacagcgcagcaccgtgaaggcagtctggctggtcttcccatgcggactgtactgcaagaccaagcacctgctgaccgagccaagccccgaggcgcttgtcgcggtcagccgcccaccttattctcgttgttcacatcagcactgcgtccgtagccgttgtcgcggccttcgagctacccaactatcgagcggtattggcttagccgcttaggatacgacctgcctatcatggatatcgacaacataacaacacacttctccaacgagccatcacatttggataccacgtcagtagtcagttatacttggcgagaaaactggcacgcattgggcttgtcgccaattataccgctgggcatcgcagcagcattaattatcgtctcccagcaaagaataaaagcgcaacgtacggtgtatgtcgaacagtagtccgatatgcttgataactaccggcaagattcatggaatggtattgtgatacatgtagataagttttgctgtgagcggcagtctaccgaattgcagtgtacaacagagaactatgacacctgaacgtcaagtacatgcgtggaaggcaaccaacgctgcatcctgcagcttaattcgccgtcacgcatcgcgagaagggtacattcgacggtggagtcgtttaggccagcctggtacccgcagcaacaacggaaatggtattatataacggggctgaggggcaatatttcgtactgagcctagctgtatgtccagggcggttttgttctagcacgcacagtctaaaagttgctcccaccgcgatcccccgccttcattcgatgccgaggagatgatgagtggcattccttgtcacgagtcgcgaccgaaaggtccagcgtaaaacaggaaaagtttcaatatgtattgctcggtggctacttgttagagtaacctcaatgttatttttattgtagtagcttggaatgcctcctagcctgcatacaatcgattacaaaggcaccgttattgtcggcacagcagatttaaacgagcacttcgaaggttcatcagttaggaagtgggacccccgctgggagcggtttacaccgctgatggttgctaccagccccactgtacatgtacgcgttgcttgcgctttgggctgtacctgttagggcctgctttccatgcacttgtaggcgatggcaatggcaggccagcaaatctcttccttggcaaccctgtgatacaagtagatccaacgcgcagctccgctctaagcggagttggcctgataagcggactccgcttatcaggcctaggccaatgtacattcgcgcgactgcgttgacgtcgacgagatggagcacattctgcgctggtgtgcgactacagcgaatatttgcggtttacacttggtctctgatcgctgcgcagtcgtcactgagattttacctgatgtccacgcagagactgcacgacaccaagagctacatctcaaagtctcacctggtatgcatgtagcccatcgggcaatgaacaagtctagcaatttgtgcagatgatctttttgactcgatttatggccgattatagaaacgcccttgatgaaccaccgttttcaaatcgccttgacgaaccgcctcgttttccttgatgaaaagccccacccctcgtcgagttcttgcagcacttgggtggtgacttctcctcgctgggagtggctccagttcggaggcgtgacaaggagtggccaggtgttgatatctgcatttgtgaccgtcgtgtcggctacgaacagtgagcactgaatgcgagttgtgagtcgagcttgcagcatttcctgcttattctccgtcaaacttgatgcacggtgagccgtccagccgaacgtggttggggaagtagatgcgccagccagagctcgttccgctgtgcagtgtgtgtcaagcgcaacgactttcctgaaactcggacgctctgcgcccagattttggctgtcgagggaggggtggcgctctccatcgccgccccacacgtacgagacacgaagcactcaaactgacgaactttaagctgcaggtataggttgtcagctcgaagcgcttcactttcgagagcgagctggcacattgcgcggttgtgctccaacgccgagctctctggagcggtcagacgtcgcttgacttccatctccaggtgttcgcgctcgatgcgcagctgcatgagctcgttcttcttacgcgcacggaaccgcagcgagttgttgaggcgcttctggcgtctccactcgtcctgcacttgggatttccaagcctctgtcgtctctgcggcccagttctggagcgagcccgccgctatcacgttggtggctgaacaacttagcgtaggcatgacacaccgctgtgatgttggaagtttggaaaaatgtatactaaggtacggtgctacttgtgtgccttaatgtaatcccgctcactgttttgctcataactttttattgggcaattagttttgagatgtaaacgcatatttgaagagagcgcaatctcttctgttagcagactgttttactgagctctacagtaaacgagagctcaattaggagttgctgactatttgcaaacccattcacggcaggaccagttatctgccgcattttatctgtggttttgtaagggggacaaatctctttttgctctcatgacagcaccgaaacaacctgtacaaaatgatttgcacccatttgaaatcgtataagacaggatatacgatatcacaatatggtacacaatattatgtgatttgtgtataaatatagtatgatttgtgctcagaggcagcgctgccatagcttagtggtaaagtcctcggatcataaccgagaggacggtggttcgattccacctggcagcattaactcaaccaaaacactagtgggctaactgtcaattagagcattagggggctgccacagaactgcgaaagcgaccgacggctgccaccgagtgaacggattgaccgccagtatgctaagaaccatgagtcgggttccccttctgataacagtttgagatcgtcaaatctcaaaaaccggacatcacagcgggcccaggcgtacagagggatatcgtatcactatagaaagtaggaaataaacaacaaaaacaatgaagacaatgtggtggaaaatgccccagcaaaaacttttttctttggttatactaaactatcgcctcccaaacaactttctcctgctggtttgcctcaccgtgcttcgacgcagactggaactgcagctgcacaggctccggcaccggagacggtaccctcttcatcttcgtcgccttcgttgccatcggatgctacttcgtcttggctgccttcttgggcttcttcatcggttgtgccatcgcttccagtgtttccttggtcaaaagacgaccggtgaccgttgctgtcttgcgcacccgcttcttggacagcggtagcacgagcacctccttctgcacgacctccttgatccggagccacgctgccagcttcgtagatgcgggggtcccgttgcgccggaaattgtcgatgcacatgtccatacgaggcttggatggagggaaaaggcctcacccagcaaaccccgctttaacgttctcacccatcttgcatcctacccatgctgcgcttgccatccggatggcttcctctttgtcgaccgaattgcgtccagtctcgccaacgtagatctcggttaggcggcgtagcttcgccttgaacgacgaaaacacagcgacatccagtggttgaagcaggtgggtcgcgttcgaaggcagcaacaacagaagcacgccaagccgagctgcctctaagatgatctccacggagtaatgagacgaaccccatccagaatcaggagaagaggtcgctgcacgtccttgggcacgctagccgaaaaaaagtgcagccactcaagaaagagaaatccattcatgaacccggagctcgaggtggtgacggcagctccgggtatggggcagccatctagaacttcgagcttgactgtcaaccccggcagcacgaaaagcggcgacaccatgcaccccgacgcgctgccacacgcgaccagcgtgaggtgaaaattgagcgcaacgtcttggtgccaaacgttcttggagcctcgaaccgccacgatacgcttagagcccttgttggtctgaaacgctgtttcgtccatgttgaacacgcgagacgcgcccaaacgattctcgaccacagccttgatcaacgaaaaaaccgctcgagatcgctcttggtcacagcgttgcgggccttgcataccgcctgagacgttcgggttgccagcatcgggtgtcgccccatgaagcggcggtaccacccgccaccaaccgtttgaccagtggccatggagctcatggtgccggctttgaagatgatctccttgcgacttgcggggtgaccgaccagttggcgcccgacaatccactcgaccaaccatgcctccgctggttgcgagagcagcggagccgggccatgacgaactggtgcgcggaagacgcccattttccccttcgcgacccatttcgtaagggtccgatacggaattggggtgctgtcgctgacactgtgggcgctgtcgccggcgaggacgcgcttcacttcagaattgaggtcttcgatctcgtacgcgggcattgtcgaggtggtcgctgcggggttggtgggtggtttgtaggcttcatgaaataggagactgagctcaaactggcgggaaatgtgtcttgttcgtatacagtttggcgggttttactggctgatagcgcttacagactttttaccaatagggttctttaaaaatacttacggcattctaattggttgaagctaaagtggcacggaactggcagattgcacgcgactggcaccgtaccttagtactggttagcgggtagagcgacggtgaggtccaatcttcggtcactagcccacctggttcagtggatgagtatcatgagaagatacgagcggattcgtcctgctgtaggttgctatatgtattttaccttggccccgtcatcaggtaagcccagatcgcctcatctcgagtggaagatcacgatgtacttcgtagtataccgtgctaccgaaacgtggcgctagaagctggagacgccgacgagatatttggtttacggtaaaaaacgccttgcaacgagcatcaagtgctctcacattacaacacgctggtgcagttgcggtagaattttcaaagccagtttaggttcgttctcggtttcgatagtacccaggcgaatacgtatcacgcacatttgagagtactccagctgggcttaggcgctatccgatagactcattgagtttgaaggcaaaacgtgcgcggtgagttatagccatcggatggcgattttaaccccttggttcccgggatttaggcaccgaaacacgtaatctacggtactgtatgtcgtaacttacgacgaaaaaagtaactaagagtttgtattggcgcgccctgtccgtaacaagagaagccccatcagacatataagattgtagagatctatggggggaagttccccccatagatcccccggggaacttacgacataagagtcgaaaacgacgtgaagtacgccggaacttacgacattgaacgtagaccgagtgcatactaatcccagatggtggatcaatcggattggtgaactacacaaaacatccatctttcgcggtgttgatagatgactgcgaggttgtaatcaccaaatcatcaatatatagccaatcaaaacattttccctctcacttatgcacaggtcaggtaatggggaaccatatcccattcaagaaaaatgggtaatcgctacaaccaacaaaggggtacttggagtgctgacttactttgtatgtcagtgctaaagcagctctataaccgtagcagcagcttcactttttcgctttgtttgtcagctttacgatatctgcccaacagctcgcccatttctatagagtgttgttgccgaggcaacggcctacaccgccggcttttctcaatccggaacactgaagcaataccgaaattgcttcgttttaccgttcctagaaaaagcttaagcctaccacggttattctagttcgcagcaggtatattgatgctgctctcgagggtgaccgcaccggtagcggcactcgggcttcgcgtactatagaaatcgcctcgtacacggagactgtcaaagcagccgaagaggatctctatacgcacaaataaggcgttatggtcggattgaccagttgatgacacgcgtacgagccagacctccgtcgttctcggcgataccgaagtatacgtcgtgcttaagttggttagtagtaggatactctcgtcatcttagtttagttattgggagaggtccttgtgggatatacgcacgatcaaggttatttacgcactactccatgcccttgtttcaatccggcatttacgtggcgcgaaatacgctgcaacattgtcgctgccaaaaccagctacaccgtacagttgttataaggctgcaaataaatatttcttcgtgttagaagtctcggcagacatagtctacttccggttatacttactttgtatattcggcacctaaactcgaggaaatagcagcaacagcccttggagagttatttagacgccattccatttatggtttttatcatttacttgtttattgtgtgtacgggcgtttagaagctattctacgagctcgtgggagctcttgacagccgcatacgccgtactctccccttcaaggtcgctgttgtgtttgcttgaaagtgggtacacgcgcaaaccttaaaaggggatgctcgtctttctctatacaaaatgccccattagccagccccggcttatgcagctctgtatccgtgtttttgtgcaattctgatttttacctctctggcttatacttttgccgacgaaaatagacttgactaaagtattgcaatctcgtttcgagccaaatgctattgttaatcgagctatgtcgtattatacgacattgagattcggcaaagtcgtaacttacggcgtcgggaaccaaggggttaatgaatctctgacgacagtttttaaagccgaggcgaagttttatcaatagaaacgactcattaccgcccaattgcagacgcttggtggcagtcctcatggctgcatcaacgactgaagtcatgccaaagaccctcacaactaaatggcttaaattatccgccacgcatacaagaaaaacatgtcgtagaaaacttaaaattcaccacaccagatgatctattgaacgttttctctctaaacaagctgcttattcattccgagctggaagttgaggagcactcggaggaattttccaccgcgctcagcgccaattcccagaccgacttctccttcgcctcaattatacactccaagcaaaaccgaagagcgcactgcttcacagatccagtgctggacacgtccacagtcatcttcttgaccacactgcacttgccacaaaccacgcgacggcaaatgtggcatgggataccggaccccaccccagcgagcgcaaacttagagaagctcttgtcacaggtctcacagcgactgggccgaggaaatcccccagactcggactgtgtcgaggcgcccttgtgcttgatgagccacgtgagcttcttgatgtacgcgtagtcgatgacccccgcggcggagatgagcgagtctgcagtgatggcaacattcacttggtcgatcatctcgccggcggggtcactgaagccgcggcagtaaatctcgactttgcctgggtcattctgtcggtcgatgaaacacagactcatctgtccgcggacgatacccaactctgagagctccgggacttccggcagtgagaccgagtgcaatatatagtagccgactgtgtcgcccctcgagtcgcgcgtgagtccggtggcctccagcatgaggtagtctcgctgctggacgatacctgacagcacggccgggatctccttagcgaaccacttgatgccgagaaaccggaaggggtcctttcgtgtgggtcctcggatagttgatagtactcgggcgtcgtcgagacggtcgttcagatgggagctgcgccacatccaggcttggttggtaggtgcgaaggtgccgtacatgcagtcggccaggtttccctctaccgagccgtgcaggaccattaacgacacgtttggagtcttcatctggtcctgaatactcatcggtagtagccatcccccagtgcatgtcacttgctgcacgaccacggccacgacgcttgaaggacaaagacaaactctggctctgaggcgttgacggacgttgaagtttcgacgacactctggtggtccgagtcgccgatcgtcgttgacggtacacacttagtccttccttcgagcgcacgagctttcagcgcttatctcgaaaagtagctccacccgctagaaactcttcattcgcagcgattgtctggcgtacgacggtctccgcttcctcgatcagcgcagcctgcttctctctggacaaattcactgccgggaaggtatcttcaggcagcgtgaacttcatcgcctccttctggttcggccctcgaagttacagctcgagcgtcaaaaggagagtggctggccatctagttgagagccacccatggggctagctgccatctatccagagcgcttcaaagcttgcatttatctcacttgtgcgttttccagaaccattcgaaccgtaatacaggagaggggtcgtacagtccccagaaatgcacgtggcattctccagagagccactcgagccttcggggaaaccacttgctaagggttttaaagggatcaagggttaagaagcaagtggtttggcagaagtcccgacttgcagcgttagggtaaactgacagttggggcgcaatttctcacgtgacacttgtggattgccgctaaagcgagatctccaggctttgatgcgcgtgacaaaagcgcgctttacagtaacccttcgcgacttgacgccgtcaaactgacggtgagggcggaatgcacttgcagtaagccgactgcaatcgagttgcagacctccatgactccactgctgccggtttaacgggttttactccaaaagtgatttggtgcacttcaacgtgaaaacccttgaacacgctcgggacttggatacagcgcgttcttttattacaggaattcacagtaccaatccaattggtagttgctgcttgcagtactttgtgtcagccagaactggagtatgtgtggtaattcctggccgttatttgatacttctagttgccattgcacacattgcctcgaacagttcaaaaactgcatcgccgactgcattaaatagaaggttggcagtcgacggaagagagatgacgatcagagctccaactctgaacggttcatgtaaaatgcagcttctacaagagaagcaaggtctctttattgcatctaagtagctcacgcctctagcaatctatcgtcgtcgggcgcgatggcggctctaaagttgcttcctatcctagtaaacccctattggggtgtatgtaggtacgtcgtaatcgaggcacagcagtgccacgattaataccaagcgaccgcgataacggttgccactggttggcctacccgagtgtcgctcgccccgagtcggagactgacgagcactcggacgcggagtccactccacttgtgatcacttcccacacggactgctccttggccttgagcagacagttgaggcagaagcggagagcgcagcgcttcaccgagccagtctcggacacgtccacggtcatcttcttaaccacgctgcacttgccgcacatcatgcggctgcagaggtggcacgggttaccggggcccgcgccaccacccaacgcaaacttggtgaagttcttggtgcaggcctcacagcatggagaacgcgcggagttgtcgccgcgcccagccgttccttgctgcaagacgcccttctccttcatgagccacgtgagcttcctgacgtacccgtagtcgatcacattggcagccgagaggatggagtctgcgaagatggaggtgttcacgcggtcaatcatatcgcccgcagggtcgctgaaggaccggcagtacagctcgaccttgccaggcccgccttgtcggtcgatgaagcacaagctcagctggccacggatgatgccgtggtccttgaactccgggaagcccggcagcgggaccgagtgtagcatgtagtagccgactgtttcgcccctcgagtcctttgtgagtccactggactccataaggatgtagtcgcgctgctggacgatgccggagagcacggccgggatctccttggcgaaccacttgatgttgagagcccggaaagggtccttcttggtcggccgccggatgctggccaaaatgcgcgcgtcgttgaaatggtccttaatgtgcgagctgcgccagatccaggcctggttcgtgggcacgaaagtgcccagcatacagtcgcccagactgccgtcgacggtgccgaagaggaccagcatggacactccgggacgcttcatcttctcctgaatcgtgtctccagtggcgctggacagcgacgtctcgccgtcgctgctggaccacggggtgtcgctacctcgacgcttgaacgaccaagaggagttgctgctgtggttctgtgctgttctctgggctttcgactccttggaccgagatcgacgctcgcagtagacgctcagcccctccttcacgcgcaccatcttccatttcgggtctcggaaagtcgcgccacctgccaggaactcctcgttggctgccagcgtctcgcgcacgacggtatccgattcttcgatgaacgcggcctgctgctccttggtcagagtcacagccggaagcgcgtccctaggcaatgtgaacttcatggccttccttcttcctccctgtgtcacggacttccggcttgagcgctaaagcgattgtgtccctccacggcacgcggttgcccgcaccggttggcgccagtttgttagtgctcgggctggggatccataacaaggacgcacaactgtctgtgatttggctcaaaaagagctttgtgcgtcgttgcccgccatccaacgcaggatctctacccccatttcgacaatgcggcactttgcaatgcccgaacgatgttcacctggatggggttacgaatccgtcgcgaggaatcccctctcagcaggacgagaagcacctccacatacatgtacatgtagaacatgcagcttgctgatagcattgtagactatttaataaatgctactgttcacgtaagttacatattacgtttcagatgcaacaagtcggctgctgcctgggatggtggcggtaccctccgcttttacaggagcacgccataacagttcctttaccttttctaagcgttgggatacggtatagagcgattcactcgaagcggtaaaacggataacctgagaaaaactatgggatgcaatgtccattttaggttgtacgtttgtcacggaggaactgtaacaatgcattcactgtggtcccgcatactctttattgtcgcgcaaacgtttcgtctatccaaccttcagcacaaccacatgattcacatgtcaagaagcagacggtttagcagagcggcagaccttgccccaaaaacttttacttcagaagtgtaagtacggtgtgatctgcgctgagcacttttacaactagccgagcgccgccgctacgcggcggggatttttagttagttggcgcttcactcgctatgctcgctccgctattggagcagactgcctacgcttcgctacggcagggcggacccgttccgctcgcctcgtcggctcgctgcactactctcaatgttaggttagtactacagaggccggggcgggtcctgcggccccgcaatatcgtatgagggggtcgccttcggcgacggagccaccttcgcttcgctcggcagctaatcggaattagtaggaatcgtacttagtgaataagcgtgacgattttgtgacggacggacagcgcgtctttctgattgattcttaggattagcttctagcatggacagcgaatacgttatcttaaactatgccttgcgagttttacatcatacggggttgaacccccagttgcgacagcgggtccgttcgccggaatgctcgtcgctgggcccgcctacgcaaataccgcgcggccctgcttcgcgggcaccccgcgcgggtttgctgcggctacgctccttgcaatcgctcactaccgcatttagtgctgacttttaggcttgattcgctggtcgttaccttagataatagtaggttaaatgtactcaatcttatctcaagacagcagtgcgcgtctccgggagcaggcagccgaccaaaccacaacaaagtcaatctcacctcaaccttgaaacgaaaaaaaaaagctgactattcggcatggttggggcgagagtctgcaaattcttattggggcaaagccgctatcacactcgcaaatttatccgtagaaccccccctataatgaaatacacactagacttcttacgcttatttactattgtgccttgcatgctttctgtctaaacaacgacgtaattcgttgttttcgcaaatcacggtgattataatagcccatcattgagttaggaggctaactcgtcgatttaagatagaatagctgctaagacaacgagttaacgttgagttatgctcactttcgttgaatggctggagtaaatccgacaatactacggccctgacattctaattctaactcgctcgctttgtctgattgctttctagtcgatgattgacatgcgttggcgatctatcgtactaaactacgtctacaatattgaagaacatccctgtttttatatcgaggagctgcaagcagctttaaagccagcgtttcctgcaccaccaaacatttctagtagaaattttctactgctactatatgccgtgctctgaaattcgagcttggtttaacgccacgacgaagagagcgaaagaaaacgtccccgccgaaatcggtgcttactattatggcgccattctatcggggaccttatcagtttgttttcttggcaaccgctcggttgatttgcttaactttaacttagagttaggctgcgagttgacttgcttaaccctttcgctgtaaaaggatacagtagtgtatttggttaacgtcgtcgccgaagataagtgtaaagttcgagcaacattagagcaccattctagtaacatatgaaagggcgtttgataaaactgctcgcagcaccacgccgacaatggagatgtcgaagccatcgtggacttgatggagagtgagttggggccttcttctagaaaacaagattcttcagcccgtgcgaaattcaacaccttcttgaaaaaatgcatagacaccaacctaactatggagacgctgagggcagcacaggtcactaaggaaatgcttggtgagctccttacctttctgttcaatgatcctgacatccactggcaaacatcgatgaactatcaagagacaactggaggagaaaatgggaacggacctgttccgcagtgaccccgagtggtatcggcgttgccgacgccatttgcaaaagcaatatctcatgcttgccatctcggaaggcaaaaagctgaagaaccaagctccacccatgacaattgatgatcttcgctcaatatcaaccatactatttctcaaagacgataagaaggcgctacttgaccgcactcttcttaacaaccagtggcttgcagttggtcgtagccccgacgtaggaatgctacactttacggacttgcactggcatggtagttttcatctcattgatctgacacggtacgtgcatatactttggctttagcattgtaataagtaattgacctgtgtgctgcttcaatagcatcaaggtgcagtagcaacagactatctcaattttttgctctccgatttgctggagctcgatacctttcacacgttggcttctcagctggttgctgacccatacaatgcctcgccgcgtgtgttctctcgcaagtgactgaagctacaacagacgagcgtgtggctgcatacattaatcgagtgttagaatcggtgtatcagtacgacacaaagcgagagctgacgcaaagcctacagtcacactcagcgcgtcgaggtggcgcagcgcatgcaagctccaacgctagcgtcaacctggctgatttggcccaccgggggctctggtccatggatggatttgctaccttactcgaatacatatcgccgacggcggctagcgaccagaacgttgcaaaggtgctcggagggtgggtggacacaaagcaggctggtcacccgcctacgcttgcctgtttcgaaaaagaatcacatcagacattcacaagggtcagtacatttgctcaagcactacggttgcttcacttctccaagatcgcaccgaaaggtttcgcggactgtcttaccgcgactctgctgatgtactaccgcgacacgcttgctgtcgcaccgcaacacatcgtccaccaagaactggagcgggtacattccactctacactcgcagcttgaatgtcaggatgagctgcttgactggggaagcaagattcgcaaacgctttgtcaccgacaacatcctttcacttccgatacaacatgttagagacagccttacaatccaggagcaagcagagcagtttgttggattccatacctttgccgaaacgctggaacggctactcataggacaccagcagctggtgacctccaatgaggagctcaggagcatgctacatcttgtgcttcgacggcttgatcgtcaaccagaaggcaacgcttcctccaccaatgcgacggaaggtagtccagatgctgaagtttctggcggattctcgttgcgatcccctcagcttggtaaggcgtggcccactagcttgacgaagctgaagggtaggcatctctccgatgttctcgtccagttctacacagaaggcctgggttctattccaaaggaacgaggaaatcgcgggcagaaggattgccttcgagctgttaaaatcgttgcctacgttgccgacttagccagcatcccaccagttcctgcattatcgcgagaggtggacagggttcaatgggtatctgcaatgaaaaacatggcaagtcagtgcaaaacagtgttagtcaatggctttaccaaagctgctgatgcaaaagaaggacacagcgcaagcgccgtcgctctggaaaacttaccggtatagtcaaagcctggggtgagctaactgatcagcagcgggcggcgtttcgctcactaccgcgtatcaggttcttagcagcatgagtgagatagttggaggcctcttggtcaagttgggattacacaatgcatatgtaacttgaatacacgtcatgccaccttcgatacaccagaacaccaccagcttcaacgacatgagcaccgccagatcggagtgcaccacgagctccgaaaacaacgctgcatccgcgagcaccacagactaattccgagagcagcacgagctcggagtgccccacgaggtctgacatcagcaagatctccaggagcagtacgagctccaagtgcgccatgagctgggagagcagcacgagctccgagtgcgacatgagctacacgagcaccactgaggccacgagcaccacaagctccaagaacatcgcacgccccgtgagcgccaacaagtccgcgagcacgaccgagcccacggccaccaccagctacatgagcccaccagctccgagtgtacctcgatctccgagagtccgagagcaccgacgagttcgcgagcaccacagagtccacgagcgagcttcgagatcaccacgagcaccactgagtaacgtccgcgagcgccaccgagtccaagagcgtcactaactgcacgagcaccaccacgtccgcgagccccgcaaaacctccagctccgaacgcatcaccagctatatgagcaccaccagcgagtctgcgagcatcaacaacaacatgagcgccacgagtccacgagcacaccaactataaagccacccaccatctcctcaagcgccaccgagtctgcgaacaccaccgagcccgcgagtgtccccactgtgtgagccgcctcctcttccttgttgtggtcagtcccttcctattttctttttcagtcaatcccagcttcgggacgaagttactgggggtacgaatatccaactatagtttatccaagtgtacacaagccgccaaatgtaaccactatcttcggccgagttttgatgttgtgcaggggccgaagttaaggcaaggcgaagataggcgatacagaaagcgccctttagatgattttccaaaacacggtagagtgtaccccctcttaaagggcgcatcctgtgcccttttgcacaagttcaagctagtaatcaaccttcttttaaaacaaatcataatcggtatgcagagtaatcatcatgtaatcattgtctatacaaatgctaagtcatacgcatacactcttatgtatcctgcaaatcaccgtagatggcatgtcccatgagacacaccgaaaaggctccgtaactttgtaaaaggacgcctagagcgcccttttagaaggaagtatcaatgagttgtatactataatttattgaggatgctcgcgaaagggttaactttacagtccacgacacgatcgagatgttttttctaacccctacatgttttggtatcacaaaaaccgcctcgcttccctgattgcgaaaatgtgcgtctcactgtttagcacggcgtcgtttccacagaaacagcagtccaattttccctgatttatataataaccaccccttaatatgtgcgctgattataaatctgccttgcatttgggccaatcattaccacccctatgatttttctcggccaatgataaggcagcggattagtcgcagagtcatgatcgtagagaaatgatactctggacggatgctcgctatcctcattcttccaccgatagatcgaaaggtgacgtacagggctacaaatgtatcggatcatatttcttagaatcagtgtctagacttacttatggctatctaaaatattagctagtgtagtactgctttcgtcgctctcggagctgtccgaatcctcgttttcactgcggctatcataacttttgatctgagcattcagatccaacaagtgggctcttgctttgtcaatgcagccttgaacagttttcgacgacaaagttttgaaagctgtatcaagccgacttctgacctgttggaatgtagtatccttggtgtattggcgcccaacttctccctttacatttgcccacacatacttgatcggctgtaaatcagagtagtgtggaggcgtgaacactacttcgtggcccttcttcttcgccatagtcacaatctctggctccacgtgctcagcaatgtgccgtgacaacttttcccacatgatcgcccttgtatcagattcagcgtaaggcaagccatacaacttacaagcagcctgcatgtcggatctccgactcccttttcggggggtgttgggcggcatcttcttgtgatattttgcgttatccatcacgatgcggcagtggtgcagttggcggtcttccagacaaacgagcagcgtttcaatccaatttttgaagtagtcatgattgaacatcccgtgataatccttagtttgcttgcctccctcaaaaatgtcaagcgtctccggcaaaaactgtgctttgttagcctcagtatgatcggcatccgggaggttacggtctttgtcgataatggcagcgatgaagcaaaatcggcgacccttttgtttctcctttatcacgttggggtccgtcgggtcataaagggagtcattatgactggagtagttgtgatgtatgtaactttcgtcgagataaaccgttcgaacgcgatcggcactttcacatgccatcatctgcacgtagctatcgcgcttagcttcgttttcagctgacaaccgatatgtcgaccctttccgctttccccgcttgcaaccacatcgttttacgaagcgttggacggtgcggagcgctgaggccgtagcggcactgtcggtgacgtcgacgactaacaactcttgctgtatgaggtggtgcatgacgtccttggctaccgcgcgctcacgaatcgcgctgcgctcacgaataaactcgcgcacagacctctccatatcaacagtcgccaatatacgggacggcttctgctcacggttagatgacgccgatgccacgggtagagaccgatacttggcaaagtcattccaaatcggacggactgtgttggctgagcgcgataacagacggccaactttgactgcgagtggctctttctgacgtaatgacagcgccagacttcaagttggctgtgacgatgagggcgtcaatacggtccaggagcgtgagagctctaccgcggttatctgttgtgtaagtttgagcttctgcgatgatttccgcctcggcgtcaggagtctcagttcgcgctcttttggaaggaggcatctcgataccagcgtgcttgcttcggagcggtaaagtggctcagttgtcaccgaactacacaacccattttttggttacggtaaccccgatttatctgacaaactgatactgtaggcaatatctaatttggcggggtacaagtttatccagtcaaaatagccggatatcattggataatatacaggtgtgggtaggtgacgataaatgtgcccttgcttctctgtcgcaagacgcggtctatccatagctcttccagtatattatacacagcacaatccaaagcagctctgaaaatttgggtcaaattgcatgtaatccggaaaagttatagcaaaaacacctctcgatgctgtcgcggtctgttaacttagagttaggctgcgagatatgatcaccaggaaggatttgctcgttggtttagagcccttaatcgcatgccaaagttcgtgcaaagcacaatacaccttacacccttttcctggtagtgcttcggttacgaagtatggacagcccaaccaggattaattcgatgcacctgatatgtggcgcacatgaagtaaaagtatactgaaatcaagtaaagtcatttaataatctcagaaatcgcatggtttcttgaaattcacgtaaaagcagaggctttttcggtggagtggcaaactagttcagtaggatattcgtttctagagcttaagagtaaacgttaagtacgaaggtgccagctctgaaatgtttgaatgaaggaggagagggtatttgccgatagcgggcaacccggttttctagttgctatgcaagtagtttgtgcagcaatatttgatctatctacaaaagcgcggaggctgtttggcgcgctgcgaccaagatagaataatgctaaagtctaatacacattcagcagtatgcggctaagatagcatgcgcaaaggcgagatgatgatgaagcgaggcacggtaggtagcgcggcgacataccggtggtcgcaggaggggaggggggggggtgtctgagtgtcggtccgttcggtggttctgcggcgaggtgagtccagctagttcggcaccacagcagcggaattttttaccgtgagcacgggggggggggggggttggctgctgcagcgaccgaaaaagctgaactgaggaccgggacaccgctcgtaggtggtggtcgtaggagcgctctgtagtccagatcactcatcatttcaccgcgttttcatacaacttttcttaggattactcggagaaattaattttgtggcaacgttgggtgccgatggccaatcaatatctagtatacatcattcaatgcaaaaatatattgaaaatacgcgaagaaatagcatgaatctgtaaaccgtcatgcatttttactattgatcgtacgtgcgcagctcaacgctcatggatgcggccaaccgccaggtgtcggcttccagtctcgtagggccgtatggcgcacctgcacgtggcgctcgagttcggcgaggagatcacggaggatcagctccacgcgctgtttaagaacaacccgctgcactacatcgctgtgcacatctgcatcacttccggggcgcgccgtgaatagcactggcgccgcagatgctgcggctgcgaagcaggcgcagcagatgcgtatcaaatgttggcaagtttctgttcatttaaccgaacaattttggtttgcttcgacgaaattgcatattcaggcgcactaccagcccaatcctcttgttacagccataaatagacacatacagaaaacaggttaagggataccattttcattccccgtcggaggcgatttcgagcgaaaattacctcgttttacgaacacaaatgttcaactgacggctctttacaacagtaaaccgtgaaagctaccttttatcagcgatctaacagtagggcaaagttttatgttttcgttttttgaattaaggatcgttaatgtcacttagctaatacgatcgctaacgactactaaagaccgggggccccacctgtgcaaagcgtcactagggagggggctctcttgaccagagtctggtgggagagtctgaaaattagtgcaaagcgcgacctcaagcgaggtcaggtggttcgtactcgccacccacgaggtcggcagatacaggacaggggccctgcacctcctgttgtgcggccgtcggccgctgtcccatggagacttgacttgagcgttgatcgcgttcgtccggcgcgtgctgaagggtgcgtgagcctaggctctaacaacatcggatgacggcagcatcccgaaggacatcgcccaaatgcctccgtggaggcgtggcttgagtgcctgaaccgcggtcgcctgccgcaagcttgaaagagtgggcctcccaccaccgtggcaacgacccatagagtcgccgccctcttgaagcgcaatcgccgtcgtcgcgcgcgagctgctcctgtgccgactcccgtcgtcggccatagtcacgcgcaagccgtcgctgcagccaccatgctccttcctgggctccctagggaggattcccctcaggaaggccaagggcccggagatccttggaggggacccttggcagacacttgctcgcgacccgtcaaattctggaataaagttttatgtaacccaggtggcgacccttcgtatgacgcaccatgtgattgcatgcattagtgggcttttaggtaggctttgtggtcgatgatcgaatgcattgaaataggtccttgacgaggtagtaataactaaactcaaatggctgcatcagtacgtctgaatagtgttgtcaaagagtttttacagacttcttacggcatgcacccatcctggttggtctgatttgacggcgtagttcattaaatcagacttgctgtcccagcaaatcagggtaggcgtatgcggagcggcgggtgcctatcggcgactacaccgcagatgaacagggtaaaagtgttactgccgcggtagcggcctaccaacggaggcgagcggttgcgaggtcgcgtagccacagcaaacccgcgcggggtgccagcgaagcagggccgcgcggtatttgcggaggcgggcccagcgccgagcattcctgcgaaccgaggactgtactaaccagaatgttctatctccatgtcgtgagcgaagcgaacagcgggggcgctgaaggggcgcccagccaagcgcagcgcggctggtaattgtgaatagtagtgctaaacctggctgtagatggtctgaacttttagtatctagaagttgcgtttccaactatacagtgtaacctcaattcaccagtgagatactcttgaatttgaatttgttgcggtttaatcggcaacctactcccggagacgcgcacagctgcatctccacctacaatgttcgtacccctaggataccaaaccgcggcaggcgccgaaaagaaaagaaaatatgcaacctatgcaacacaactatcctaccagtaagtcaatgacctagccgaagagtttcatcatcgccaaagctcacggggggttattgtcgccattcttggccttgccagcgcgttccttgtcatgattgtagtccaacccacttagtcggacacacgggttcaccatcgtagtcgccggagtagtgttcctgctgcagttcggtttcgagcaccttgcttctcagcggaggtcttgtagtcgtaggaccacgatcccctgctgcccagtagctgcgatagaattgtactcgcaccttgccattcacgcactgaacgttgcgcaccttgatgttcttgtgcttcagaatttcacgccacgcgaggagtccttgtttcttcttgagcccgtctgcatcagcttgcttctctcgtggttcatccgagcagagctctgccgtatttccttgcgagtccaacagtgctttcgcgcgcaaatcaacaaaatgtcgtgctacagctcgtttcgcagcttcctccgccatagctgtcagtcgcatccccagcaatgcattcgtgcgcagctcaactattatctgtgctacggctcgtgttgcagcctcctccacgatcgccttcacaggcttgtccagtttctgcggctcctcctcctcatgtttccacctgcgcctcgttgtttgctcgtggcttcgttcttgtccctggcagctactcctaccagctatcacatctccatcatacgcttcgcttgggaaccagcacccaccctggaaccaccatgcatgctccgatgcatggtttacgattcttgcgggactacgagcgtcgtagtgttgcggttcttcagcctcttcgcccacctcctcacgtcgattgtgtttgtagtacttggccgtgttcctacttgcactcgtgctgccgctccagtcgcgcgcacgctgatcttcatttgccatgatcctgggtccgtttcctccccggtatactttaatcaagataaaatatctttccagcctccctagagagtcgcctgcccgacccccgagagtggctttaatcaagataaaatatctttccagcctccctagagagtcgcctgcccgacccccgagagtggcccacttgcgctctccgacgccaaatccactctccaccagtgagatactatgctatcttagacagtccaactagtactataacgcttctaacaattatttaagtcatggaaatcttgctgactgtgcatttgcctttccttcgttgcgatatatcgtaccacagctatagattctagatgaggtttctagatgaggacatcttaactaaagggttaacccccccaaaatcatatgcatcgaaatgaaaccacaataacatttatatggagcctgatcgtccggcgtatagagttccctggtaagcaccatatatcactacgtatcctaaatttcacacccagaatacgtagtgtcacgaccgactgctcactcaggtacctagcatgttataagtgctgtccaaacgacagatatgttgggatcgaagcataactaactcatctacataatacttaattttccccccatcatcacaatttaaaaaacaacgctaaaaatgtatgtttctattttccaagtaccgtacctcaacacacaaaaaatactttcggtctttctcatttgacgctcaaattaccgttaaaaaagctatcaatttcttcaaaaatgcttacttcttggtaatattttgcaattatatgcgtcttgattggctaaaactacgtttcaatttcaaaagaagtgccccttgaaatgattaaccattctttctgcgaggttcagcagtatacttgggttaaatgtatacttattattggtaaaaaaactgaatgggggtggtgctgcaaatattccatataatattttgtagcattgcccccttagcaacccaagcgaccaatcgccgtgaggatgcggcaatactagttttttaaagactgtaaaacctctaattgtgcccctggggtactaacatgtaagttagtacacccacccacgcaacgggggtggggcactattagagggtggggtactagcaaagcgagcagtgtctcatgtaaatcccgattaaatacccccacctaaaattcctcgattaaaaacttgcagctaagagatctctatatattaacaaggggttcgcgaccgaggtgtaggtcgcctggtaggacccttctaagtagctcctcgcgaagcgcgctgttctcgctttgcaacggcccaagcgtagccacccgcgcatgagcttgcgtcaatcgtttctgcgaccggcgggaatcagatgagagcacctgatactctcgcgcgtgctgggcccgggcttggcgaagttggcccaactgatcctcaagatcccgggcgtggcgctgcgtgtcgcggacaacatcatggtgtctactcgcagcctcgttagctcgctccaccgccgcggcggtcaggtcggcccggcggttggcagcttgaagatcctcctggagtcggtccaggtgcgcggcgacgcgatcgagaagcccgtccaactcgtggatccgctcaccccgcacatggatctccaaccggagcgagtggtcgacggagtccccaccagtcatggcacgcagatcctcccgaagctgctggttggacgcctccactttctgcgcgtgcgtcaaccggtccttgagccgcgcttgaagctggtcacactgtcagcgggactaatcgagttcagcggcggttgcagcgcgggaggcctgggcggagcgaatttggttgtggtgatcggcagcatggcgtgcgagatctgcgttctcacgacgcacttcactcaagtcttgagcgatccggaggacggatccgtccagctcgccatcaatcacgcggccctcgatccgtcgctccagccgagcggcgtaatcttgaaggcggtcgtaagcttcggtcgacgtctctcggagcagctcatgctcgatcctgagaacctcaaactggcgcagctggtccttcatgcgatccattgatgccatggcgtcggcatccggaagttcgcatcttctagcttgtcttaactggcgttgtacttgcgctggacgaaggtcacgaagcgatctgcgatctctcgcgtggcggcgggtgcggcgtgaagctgtttgttgtgctggcgggtaagggtgtacgcatggcgcagctcgtcaaaagcacccagcaccgtgtaatagtggttggttacggctaacaacgcagccgacgtgacctcagccgggtcgagcgacagcgcgagaggcatgacggacaacgtggtgaggcgaggcgggtgaacgcctttatcgtccagggtgtatagcgtacgtccggtaggcttagacccgggagggtttagcttacggaaacccgaaactcacaatgaatataagctccggttgacgtgtgaccttgtgcaatccctataggtgtcgtttatcttcggtggaccgagtttcaaccttgggaatcgcaattgatcaaagatacaggaatgcagagaacttccggacgctactcgttccgggagtcctgaatgggagtgagatcacgagcaaagaccttctccaaaataaccaatatcaatacagagtctgtacacacaatatgcagcctgtcaattttaggttgcaccccgaatacaggtaaattcgggatgccccacgcgcaccactcctgaatgtcaggagaacaatacaggtaccttcctaccacacgcaatctacaatcgggtcctagggggcgattgccacaacctctaaaacacagggaatatgaaatgcaagcgcacactgagagtgcacgccacaactgggaaatgaaacaggtgtatcgacctgagagggcaatacttttgggtacctgacttggcttgatgatgcagtgagaagttttcgagggccttggaccaggcgttactcaacgctcgcagcggggctccgaatggtgcaccctctcgtggtctcctaggcggtacactctcccgtgggcggcggctttccttaggcgaatcacgaaccaggcacttgtgcacttgaacgcaaaacaaactctgttgatctttatcctcttctctctctctctttggctatctctcttctcttttgtatctctctcttcttcgttgtatacttctcttcttcttcgtatgatcttgttaccttgagggccgctggattcttcacgcggtctcctctgctcatatcttcatacacttgttcgggttctcttggcttcagtatacccgggcgtcgcgtcgggcacacactcatcacttgatgtcggagggactcgggtgcctgacctggggatctgctgcactgctgacacatcgaactcagactggctcactctccatagtgaaaccaagtcacgctcggaactggcaccttggttgctgacttcgctgacttggcacgttcctgggcgttggtccattggcagatatctgcagtgtcttgggcttctctattcagggcagtcatggtccattcaggatgatcggcacttgggcactccgggcgttgtccattcaggatgatcatccgtcattcggggtagttgcattccattcgagctgtcggttgtgccgtcgtctccacgagcttcagtgtccacttggtctcgctgcttgaggtcctcaactcattgtcgggccacactcggggtcttcgtagtcgcagtatcctggatgttcatcttcaacatggtggtggcacaattcagggtgtcgatggcttggtacacttgagtagcttcacactcgagctgctggggattcgaagtaccttgggatgccttggcctcgccaagaagggtagctctccgggatacgttcaccggggcacttcatggtctcccttcgtcagactaggtcggggccggactgggtgctgcgcacctccggccagttgaggtcaaactcgaccaggtatccatactccacatctcctccatcatgctcgggcgttccacagatacaccatcgtgaatcaacccttctttcccacacgaaccattcgagtgctcttgtcagagccaccgggcagcggtaagcaggaaaatgtcaagttgcttcgccacaaccgcccctctggttatgggcttccacagagaatgcgatccccgaggtggaaggccatgagcagaccaccaggcgagcctggggacgttgcttccggaacttcaatgtcctcccgaatcactgagcatcgacccgtctccgctccttttttcaccgttgctgcggatcgtagtccaccgcacaaacatgcgcgcatgtcgcttcaagtccactgttcacgtccaagacatgctacgcgggctgaaatcccaacggtgacagcgaatcggaaccgacgcccctggaggcgatcggctgacaactgcaccagtcttcattcggccccccgcagacgcttggcatccgaagcatcttctcccatttctagccattgcgggccgcagcttcaaacaggcactacatccggggcgtacgtgctcgtcctctcccgggcgtactcgccgcagcctcgctctcaataatccaatcgcaatcaaaaatgtttccgtcgaaatcacacttccgttccgctcgtgttgtccattcggggtggctatagcctacgagtcgcgctcccaggctgtatagcctgaattcaccccttagcactcgcccctggggtggacgcataccgcgacgcactgcagtcgagttcacgtttcgagatccgcccctgaccattttcgccgttgtaggacacgtgtcctccaccacaaagcgggtagcacacctcggtacgggacgccacattacttcgatctggatgtccaaacggatggcgacagcggtaattcgggttctcccggagcatttcaggctgtctaccacatccatcgtagaacgagtcgtagtcctcttggttccatggcgggtaggccggacgcggttgaagtcgatggtgttgctggataggaacgtttgaagggcaatatggccatcccgaatattccacctcgaaggggatttcctgaacaagccgtgccttcggaagcagtcgcacattcagggagttctcagctcggacatcctggacttggtctgttcgaccatccgtggcggcgttcaccagcttagcggcattctggactccgttttctccgtccctagcggcatactctccgcctcggcgcttcgccaccaaatgatctcgagcggcttcgcccgccttgaagaattgcgaatgcggcagtccaacgtcgtcatgctcaacatctaggcgcaggtcctcgcatcgtttcaggatgtattccaggtctgttgtcgtttcaaaccgatgaccttccaggctagtcttgagttggccataacgaagcttccggatgtactgccgaatgtgcagctcacactgcttgccggacttccgaaagtgtacaccggctcgatcggcggcaatattcaggcggtacaagaatgccaaggtgctctcgtcgctgcgttaactcatggtatagtaccgttcgggtttcggcgacgtcgattggcagtactcacgcttaaacgtcctggatagtcgcgcccagtcgtgacgaacatgcttgggtagctgaccgcgccagtcgcgcacctcgggtggcatcttcagcttgagttcccgcagcttcgtccggttggaccagccaccttgagaagcgagattcaggaagcgctcccaccaatgacgccgaatagacagcggttcaccttggccgaagtcatgcaacacacttgcatccacgtgcggccagtaagtaacgacggtagtgccatccagcgcaacaacgcttgccacggagtcctcacgcgggctgtcagaaccatagtcgcttgaatcctcagaactacattccgagcacgagctgtcgtcctaggagctttccgagtcgtctgaagtctccgaatgcgagctcttcctggagggctgtgccgtaggttcggacctccaatcacgatgggactccggatcaggcacggctgttgttcctcgggatgcgcttggcggggtagtcctgcatgtcacttcttccttcgcatagtcatctccagtcatagaggtccaggttgcatgaagctcggctgcggcagatcggccatctggtttgacccgtctctctgttgcgtgtccttgattacgccactggattcttggtgcatagtcaggcacctcgtctcttgtttgacttgaacaatcggatcaggcatgggtgttgcttcagcaccttgaacctgggatgatgttgtccgagtgtcgcgagagtgcgttctccgaacgttcccaggatcagaatcagccaccttgcctcgcgactgggctgtttccagcagtgccaacctccgctcgaaaagcttctgctgttctttcaagagtctccgctgttcttccaggaccctctgcgccatgtcttcctgagcctgtagcctcgcatcatcctggactcgtcttgccgcctctgtcaacccggaggtgttcttcctgcgcgtgctccgcattcacggcctctcgcgcgtgctgtagtgcgtcctcctgggtggcttccacgccttcgcgggtcttcgctgcagacgtctattccacggctacctggattggagtccgggtgtccaaaacacactgggtctccgaggcttcttcccgaccggccagcaactgcgtggcttggtaagcctggaaggttcgcatcatcttctcgttggcagcctcaatcttccggtccgtgacgctgtccgtatcctgaagttgttgcttcaactcccgcacactcgcctccattcggaccacagtgtcctgaaccgttctggcaaagtccagtacaacttggtcgtccagaattggggtttgctcatcccatttgggcttcgctgaccgacgtgacggctttaccgatttcggcgagcgaattggcttcccggtgtatctggaacttcggcggcttcgacggtctgcatcttcagaaccggatgcgctagaggagctgcttgggcttgaccttctggagcgggcttgcctccgggacatcttcgacctgcgccccggtgcggccagactccgacataacgacatcgtccggggctactggcactggtgatgcagggaataatgtatcgacggctggaacgctccgcacttcgggaatccgagaagcatcagcttgggcggtcatcgggattctggattcgtcacccggatcagtaaagtcaaaaaccatccgggagccgctcgtcagcgccaccctgggcagcccttctggaggcacgatcgatacggatgatctcaaccgcgaagtcgcgttcagcaagctgggtaccggaccttcctggacggccagcagcggactctcctccttgatcatgcgcgcctgagtgagggactcatccgagtcgtcgtccggcacgatcacatcttgggccggccgggacgttcccgaaggtttatccacggccgacgactcaaccttcacggtgcctcccacagacgcctgggcgggcacatccggaatggacacgcccacaacttccacctccgagtccggggtggagttcacttccgagccactcggggggaccttctcttcgtcatccggggtggcagcacccagggacacgtggtgcgcatcctgggccgccggctccgaatccggctgatcttgggcctccgtcgactccttctcctcgcgaccagccttgcgcctcgcggcgtttgtccggcgagcattccgctcgacttcctcgagcgagagctgctcttccggcggcatcccttgagtccgacgcgagcgtcgcacgccatccgtgcgtccaccgcgtccccattcgcgtatgcttccacttccagccagaacctcaagagttagtaggttattaccctcagcaccccttaaagatcctcaagcaatatacaatactcggtcaaaaccctaggcaaccaaatccgggcacgcgcaccaactgaggcgaggcgggtgaacgcctttatcgtccagggtgtatagcgtacgtccggtaggcttagacccgggaggttttagcttacggaaacccgaaactcacaatgaatataagctccggttgacgtgtgaccttgtgcaatccctataggtgtcgtttatcttcggtggaccgagtttcaaccttgggaatcgcaattgatcaaagatacaggaatgcagagaacttccggacgctactcgttccgggagtcctgaatgggagtgagatcacgagcaaagaccttctccaaaataaccaatatcaatacagagtctgtacacacaatatgcagcctgtcaattttaggttgcaccccgaatacaggtaaattcgggatgccccacgcgcaccactcctgaatgtcaggagaacaatacaggtaccttcctaccacacgcaatctacaatcgggtcctagggggcgattgccacaacctctaaaacacagggaatatgaaatgcaagcgcacactgagagtgcacgccacaactgggaaatgaaacaggtgtatcgacctgagagggcaatacttttgggtacctgacttggcttgatgatgcagtgagaagttttcgagggccttggaccaggcgttactcaacgctcgcagcggggctccgaatggtgcaccctctcgtggtctcctaggcggtacactctcccgtgggcggcggctttccttaggcgaatcacgaaccaggcacttgtgcacttgaacgcaaaacaaactctgttgatctttatcctcttctctctctctctttggctatctctcttctcttttgtatctctctcttcttcgttgtatacttctcttcttcttcgtatgatcttgttaccttgagggccgctggattcttcacgcggtctcctctgctcatatcttcatacacttgtttgggttctcttggcttcagtatacccgggcgtcgcgtcgggcacacactcatcacttgatgtcggagggactcgggtgcctgacctggggatctgctgcactgctgacacatcgaactcagactggctcactctccatagtgaaaccaagtcacgctcggaactggcaccttggttgctgacttcgctgacttggcacgttcctgggcgttggtccattggcagatatctgcagtgtcttgggcttctctattcagggcagtcatggtccattcaggatgatcggcacttgggcactccgggcgttgtccattcaggatgatcatccgtcattcggggtagttgcattccattcgagctgtcggttgtgccgtcgtctccacgagcttcagtgtccacttggtctcgctgcttgaggtcctcaactcattgtcgggccacactcggggtcttcgtagtcgcagtatcctggatgttcatcttcaacatggtggtggcacaattcagggtgtcgatggcttggtacacttgagtagcttcacactcgagctgctggggattcgaagtaccttgggatgccttggcctcgccaagaagggtagctctccgggatacgttcaccggggcacttcatggtctcccttcgtcagactaggtcggggccggactgggtgctgcgcacctccggccagttgaggtcaaactcgaccaggtatccatactccacatctcctccatcatgctcgggcgttccacagatacaccatcgtgaatcaacccttctttcccacacgaaccattcgagtgctcttgtcagagccaccgggcagcggtaagcaggaaaatgtcaagttgcttcgccacaatggggtcggaaggcgcggagtcgcagataacacacgggggcggggggaggggggtgggggggtgagtggggggtccgaagagcgaccgtatccgacggtgtcggccacgcgcgtcctcggcgcagtagcatcggcctcatacggggcctccggcgcgtcaggacgtccaggcgcaggacggcggtggcgggtccgagccatgatcaagaagagtggcggcgaaaagaggttgcgccggttctgcgggaaatcttcaaatgatgcggatcaaaggtggcacgaggtgatgccgttgtgcagcagcgacctcgtcccaggggcggatgtggtaagaagatccgctcaagaatggtcttgatggaactggatccgccatttgaccaggtaatgggatccgacagttggtgacggtgtccagtccctcagatgacgccatggttgctggatgggggggtacggttgctggatcaggacggttgatgttggatcaggtgcgagtggtgtggtgcacacggatccggtcatctacattaggaccccctagattcggtgcggatccgtaccagtttatgggtacagtggctatgttgggataattaggcaggaaggagagccagtcatggataggatccaagtcggatgggaaggcagggcataggctaacataaatcagagtcgaatttgcttgggaaccacatacttggtccttagtatcgggattagtattggtccatactttaatcaagtgatttgccccccgcacacgtggcagactgatgggtagcttggccagcagctcgcgcccttcggccctcgccccccaacttcctcgctaacagtaggcggcaagcgacgtaaaggaaaatgatacaacacccccaccaaggcaacaactccggatctagtataatacttatcggatccacaagatctacggccaagaccaaggatcaacctacccagacccgcgtgaagaaacccccacagcggatctaccccaacatctccctaagtccccgccaagggcattcaagttcacccgctgcgatctcgtgtcaacgacagacagatccagcccgccgacgggtacacaaggtgagccactcaccaacctacggttattcgagtaccccccctccgttagtcggtgtctgggcgcagtgtgtgagtgtgggatccctgctaattccagcggatccactccaccacacgtctcgccttaaattctacgctgacgcagagctgaaccagacggctgaattgatggagttggtctcgagccaaggaatgctgctaggcatggatgcgatctgtgaccaccgcttcaaccaggctctgcaacgctgggagcttcagggctcatggatggggctacaagctatcgagaactcgtgggagcctctcaccactctcctccaggacgtccccaaaaaggtccgtgactacgccatcgccagcgcggacgatgacctgctccagcaagtcgaataacgcctaggccacctgcgagctttgggggcagtgtcggccgatcacgctcaagctctgggtgtcgacgagcgtcactcgggctttggttgacagctcggaccaatggcgacagcagcggcttggctcggaccaattaatagtccgagagcacgcgccacgaggatcgcttaccccgaggcacgcagctcgggctagcagtggacgccagcacgcgcctacaatcgcatgaaagacactacaataggagcaagagcagccgagggctccaggagtagtttgcatgtcgtttaacttttatcactaatcaacttacctcttcgagtacatcccgggtttcgcgacagacgcatatgctttcctaacggagaggcgtctttccacttccagccgctcacgagagacgaagtggatgcgatcatcaaggactgggagaccattttggcagtcaatttggcgtacggggactctgtttgggtggacagtttatcggactccgattgttcgaagtgggctcgacgatgcgctcattgtccacagaaaatactcaagtcgcctcagctgctcctcagctgaagcaggtgagagtttggccacgtcgtgtgttcggggtcggacgctgctagtcataccaagaggttggaccagtgaccagtgtcgaaatgtgtcaacgaaagtgctgcaggaatttgatacgggcgccttcgtggtggttacgaacatcccaggcccagtgcacccccgttatctgcatctcgaccagcaccagtcttacattgatgaagaagggaggcatgttgtccgcttcggagctattgcagctggctcggacgctaatgctcggtaccacgaagttgtgaaatctctcaacaacgtcgagtgggtccgcgaagggggagtctgcatcacgctgactgagatcgacgaggctaccgttgatgtttcgttcaaccgatgggccaagtgcgagagtgagctgcatgcgggcaagctctccatccattgggcccagtttgcgtgccaatgggcacaagctataacctcatccaaactattcacatcttaggccatctcatactttattttatagatcgtgtaaggatcagcccgcgcctaaaaaaaaactacctgctaataaatatcggtactgcaactgttaaattgcctgaagaattcacagcgcgtctactaaagatacagggtaccaatttgctgagggaaccaattcgccacgtgtatcagctggattaaatatcaacgcttcaacgaactcttcagcatgctagatcttcgcgtcctcacgtcctcacgtcctatcagcgctctttccgcagtcatcatctacccactcgttatctggttcgctgagctcgctaagtagtccttcagttcttatccgaccttgggggccgcaagaccttccggcatcttcatttggggtccataccggcatctcccgcgagatctttagggcaggcggcggatgcacgatgcttctccactacaaatgaaacaggcctaccactctaactcacacgtctgcgcttgcgtgtctaggcctagcgtcgacatcgacaagaacactgctaatggcacgctcaacatgaaggagatgctcgcaccgatcgcaagctgcgttcaccttcggcaccccaacctgcgttcagggtgcaacagtcatcctgtgcgcaggccgttgggcgtatacattggcaccaatttcgtatcgtccggtgacgtcaggctcgtgacttgcttcgacgggtacagactacaaagtttgtagtccaaacactcccccgccatggtgttaacggcatagtatgggtgtgttccgcaaacgcgtactgtagctgaaacccgttagggcggcaaatgggttcggttgtcgggagctccgcgtgaaaatatgtggatttttttagtagccataagaccgttctcgctcgactcaagtgcaacagatagccaaagcgcctacacgtggctttccgatggtttgagcatgacttcataattcccattgttcgtagcacaacaacaaaatttgtggatttgggtggcatattggtgccctgtacccttacattgtcctgggtttcttgcaaaagcgttcaaactaggtaacgtgacttacagtagtgtacgtggcgtacagaactacgtcgagcactattgtgaaaaccggcaaagatgtccagaccagattagcttgattaggagggataaaaaatatataaaaaggggtacgccaaatcctaaatcgtagcgttggtcgtaaaccgtccatgtgcaaatccctatcaaatgctaatgagagcctagcttcctgagctatataaatggccgcagaggtccactgtatcgtgcagcgggctagcgcaagcgtataagcagccactcgtgccaaatttcagccccgtgaatagttcagacgcagacacatattgcatgtacccatcgggtgtttcatgtatacggcagcgtcgagtttgccgtccatgttgacatggggcaccgttcatataaacgagctaccctcataatgcccagggtcacatgggcattcgacgtgatttgattataaatcgacggcagtccgcggtatatgaacagggctggggaacgccaaatcggagtagcatcctatttatatataacaaaacaaagtctcagcagcttattgagcacccaaatctatcgatttgcaaaaactaggacatagtgttcggttttcacaatacatgtattattagtacatgtttggtgacagaactatacgtctattcctcaacgtaccacgtcattgctactcacactcgataagaatccacttaggtgagtggcagactgccactgagtctcccaatggtacgacttggcgctctgggcataaattatgcctgaaatatgccgcacaattcatttggccttagctcagccacgtcactgctcgccatggcctcgctgacttcatgctcgctaatcgtcagcagcatctacactaaactcgctgtggacaacgtcgactatgacttcgaagacacggaggaggctctgaggggggggggggggggcagttcggctggagcaggcgcgacgagagcgccagcgcctacggatggtgcattaccggcgcaagaagaaagcaagtgtcgcgggcatggcccagaagcggcaacgtcagaaggaagagctgcagactcgaatcgcagcagcgaacaacgcggttgctgaaccattggaggtgacctgccaaggaccagtagacgctgcacttcaacggcttagcacgcagcgagtgcaactggcgagagagaacatggctcagcatcaagagctcgagcggtaacgcagtctcggccgagtcatccagcgcgagtttctccgcggaatcgactcctaagagcaggttccttcgcccagattgaccgaccaggacgatatgtcgggttggcgcgtatattttctgagcaaggagccgtcgttccacttccatccattgtcaaaggatgagaataaagacgcagtgaagaggaatgggctcgcggcgatcgagcggtatccctgcgttgcaactgtgggggtctatttgggtggacggtcgattacgcgcctgtgactcgtaacgaagcgggaacatccttcatcgcccacacccagttctcgcgtcgtgtccgttgcactctctctcactcttgaaggcgagtgcttcgctacgttcacggaggtcgacgataagtggatcgacgttgtaatgggcctactttggctcactactttagcttacacgtgtgcgcacgtgtgtgaggaagcgtagctaagtttaaactagagttaattatactcgggcctccgagtttagattaatctaaataaacgatccaaataatgtttttgggttaaaatgagaactgctagttttgttttatgctttctgacttcctctaaatgtaatattctaagattagaatctgccaacggctggttggcagaattccaatgctttgcatgtcgctcatgggctaaaagatgctgcttgcagccaataggaatcctaagtctctatggaccacccgtcatggcgatcgtaaatgtatgtagcctttgatgtgtctacaccaaggtcgagaaagtctttcgaacctctaacagacatcgtgtctgttagagttacaagtgactgtagccacttgtgcgtgtaaccctgttacaccatccccccctgaaggttagacgcgccgagtcacggcacgtcaatcaggaaattgaccattcgtcaattcttcacgttgggagaaagaaaactcgagctcattccgcaataagctcgccgaagaagaccgccgctactgcagaggggaagactgctgggatagagactctctcaaccgcgagcgtcacaaagcaaagcgtgacgctctagcgggcaaggctgcggcggggacaacccagccggaaattgtcctcgaaggttcctccgtagtcaacgacgccgttgactacggggacggcgacgtggagatggaagagggcgaggcctcttcaagcgagcgcaaggagtctatcgatagcgatagtctcgacccgcatgcgggtcgagacgccctcgtgaaggagacgactcggacacttcgagctcgaagcgttcgcgcggcgagagcgaaactccactctctgctgctggggctttaaactccccgcgtgatgtggcggcttcaagctctccgcgcgctgctcaggctgcgcgcgatccgtggatgccgtctgcgtcagagatcgcagaccgtgtgggtaacaccgtgcctccaaatgaaatcccgctgtacgtatgcagtggcatccacgacgatgctgtggcggaggagcagcactttgatccgttaacgaatcaaaggcgcgattattacatcgggctcttccacgaactccggtacttctccagcaagaagacctcttctcgcagcaaagtgcctgagtgacaggcactttgtcaaagttggaatgcttttgttgagaacttcaacaagaaaacgactgcttaccgcgagcgggttgagcatgcccgtgaacgcttcgagacattctccacgcgcgggcggctggagcagctccacagatcctctgtgggcgctggtattccatgcgctgtgcccgaaggccaacagtgcacgttgtgtcttccgggcgcggtactcttgagtgaccgcgacctaaacgggtacacgacgattcgtgtacctgcgagtctcagggatctccgtgccaagttcttggcacgcgagaaccgcggcgatcgcgaaacttcgggcgctgcaggtaactacagcgctcacactaccttcgcgccggtagtgcgtggtgagcttcatacgccctcaccttttccggaacatcgtgcagcaggacgtcccgcggttcccatgtatcttggtggggcggaaaccctctccaacgaatacgataacgaaccggctgccggttcgttttcgggatactatggttcacaatacgctcaacaatccagcgtgttgagccgcgggcgtcgcggatcggaggcggtggtggtgggaacacgccccgggtatggtcaacctggggttgaaactggcccgacgctcgaggagcgggtcgctgctgtggagcagcttcagagccgggagttcgacgctctgaagcaggagatggcaaccctgagagctcaagttgctcaggcctcgcagaccgcgtcgaacgtctcggtcgacgtgggaggtcgcgtcgtgcgcttggcccagcgcgttcacgcgctggagcagaggttcgcccccgccggggcttccgcttcgggtcagccgagctaggtggctcgtgctgtcggtatggtttcagccgcccgacgtaaaaactcggatagaggctcatgctagatggaatatctagcgtgtaggcgttgccatgccgtgccaacaccgtgaacggcccgatgaagcgcggagcgagcttgctcgccccgaagtcggaaactgcatgtttaggtaggttttgagtagctaacagaacaaatgaacccttcttgaattcatttgtgttgcccctgccaacgttgtctgcgttcagcttcagtcggtcgacagaagctgcaatagcgtcttggacaaaccgaatgacggcttgtctgcgctgcacgaagttgattgcgtccgagctgaactcgttcagctcgtttctagcagtaggcccggcctctgcgttcgtcttcgcggtgtctgtgccctgcacagacccgttcttcttcttcttcttgctcttgtcggcgtctgtgccctgcacagacgcgtgcttcttcttcttcttcttgcgcgtagtcgcggctgacactgtgcaagtgtcagcggcattctgcggctgctgcgttgcagtagatccccccacttaaggaaggagccaccatcccgagtagactcgggaggcgtgggtgcctgatggcattcacgtagaacggtgtatgcccggccgaggcatgtaccgagttattgatggcgaactccgccatcggcagacactcgctccagtgttggaacgagtgagcgtagctcttaagcacgtctacgagcacgcggttcacgcgctcggtctgcacgtccggctgcggatggtccgcagtcgacatcgaaagttgactccctagaagtgtaaacacttcttgccaaaggtgtgcagtgaagcgcgggtcccgatccgacacaatgtcgatcggcatgccatggtgtttgaacaccatgtcaacgaacagacgcgccgtctgcttcgcagtcacttcagcgggtaccgcagcaagatgtaccatcttgctgaagcggtcaacaaagaccacaacgcccgtgttcccctggctgtccgggggaagaccgaacacgaagtccaaagacatggactgccaacactcccgtggagtcggtagtgactgcaagggagcctcacgaaaggcgcaggcttcacacgttgacaaacctcgcaagcacggacgtacttgcgcacccatttatactggtgggcccagtagaagtctcgcgtgagaagaaggtatgtcttctcacggcccggatgccccgcagtcggtgcatcgtgatactcatacatgatcctgagtcgcaggtcatggtcattgggcacgacaacgcggtccgcgttgtcgtcgactgcactgtagagtagtaacccgtcgtgcacccgataacggtgtgcacgagcacgaagatgcttcggcagcttctgacgagcttggtcagaaggcgctgagccgtaggccagcaagagcttcgcgtccgcgtcgtgcgcgtacgcgaccttcacgtcgtccaacagtgacgacgttggggtgctcgatcgcatggcgtcaatggcattgacgtcggcatcagtcgtggcgtagtcaggtcgacgcgagagcgcgtcggccaccacattgagtcttccgggtttgtactcaacccggaagttatattctgcaaataatgagagccatctcgccatccgttgcgagatgtgcggcgacttcacagccgtccgcagtgacgcgtggtccgtatagaccacgaacggtttgcttacgagtagatacaatcggaacttcgcgagtgcgtacttcatggcaaggcgttccttgtcatgcaccgggtagttgcgctcagctggcttcagctgacgcgattggtagtagaccacacgatcacgaccctcgtgatcgtgatgcatcaacgcatatccgattgcgaagtcggatgcgtcgcacacaacgtggaacgggtgatcttggtcggccaccgccaggatcggcgcctcagtcaagccctgcttgactacatcgaaggcctgctgacactcagcagtccaaatccactcggcgtcctccttcaggagctgtgacagtgggcgtatcatgcccgcgtagtccttcacgtatttgcacaagtacgtggtcaagccaactgccgcagttccttgacgttcggcggcgtcggtcactcattgatcactctgaccttctcagggtcagggcagacaccgttcttcccaacgtgacacccgagcacgggtatctcgctcgccccgaagatgcacttcttcatgttcgcatagagcttgtgtttgcgcatgagcgcaaacagcttccggagatgcaccttgtgcatctcaacatcgctcatcccgtcggcagcccggctgtggacgaacacatcgtcgaagtagctcggtgcaaagtcgcgcaccgagcgcaacaagtgcgtcacgcacctgttgaaggtcacaggagcgttcttcagaccctgcggcatcactagccactcccagggcatgccgctcgtcgtgctcacggccgtgagagggatatcgctctcacgcatgaggatctgatagaatccatcgcgcaggtcaagagcactgtagatagtgctcctggccatcgaatcgatgatgacatcttttcgcggtatcggtgtctgcgccggtatcgtcgcatcgttcagcttgttgtacgcatgaacgatgcgccaaccgccctgtggcttcttgacacagaacgtcggagcagtgtgcggggattctgattcccgcacttgtccagctttgcgacgactctcaaagaagtcgtcgatcgccttgacctgctctcgcggcagtggccactgccgcgtgacacagtacttcgtgcccggtacgagatcaatctcgtgctggattcccttgtcctgcggaagttccgcagggatctcttcgggaagcacgtccgcgtactcccgtaagatctcgtagtagggactcgtcccagctctgctcttcaaagcgctccttcttcgtcttcgcactgagagtgtcctcgctctcagtggtggtctccatgaagaactgcctcagttcttcattctcgctcttcgttctctcggcgtccgagagaatgcatatttgctcgatgcgtccatcatgcaagtcacgcgcgaagcgcttccagctcatgactggaagcgaagtgcttgcgtcgtaggattagcgagagtcagctccctgtaccgaatccggaggtacgcgtcaagacgttcagcgtctcgacgtccggcttctcagcctcggtctgcccagcagacatttcttgtagcgtctcggcccaggccgagacttgcgcagcggtcttcgcatgcgccgtctttttgttttgcggagcccggctccgcttggttcttgacctcgtccaggcccagccgtggacgggttttcttcttcagtaccgccggcgggtacatcccgcgggcgagcgacttcaagcccggcttggtagaacggcgcttcgtcgtgcagcccggctgcacgacagcatgcaagtttttttttcggtgcgggacgtttgcaaccgtccgcaccgcctgcagcgtcgactcccggagccgacacgccatcttcacctcgacgcctgttataggcggagaccctttcggggctgttgtccttttcgatgccttcgcaggtcttccttggtcgtgtttgccgcctccaatgacggtgtcgtcgacagttgagaagcgaaggacacactggccaaacagacaactccggtggatcttggatctgcacttgaaggtagttcactaggaaggtttcggatctggccaatatattactccagtcttacaaccaacaccagctctactaccgctaacctctctacgccgtgtaaggccaatgtcgttcccgtttccaggcgagggaggaaacgcttgcgatgtacaaggcaaattcggttctgatttatgcttaagttcgttctatctcaaagtcctatcaccatgtggatcctatcatcccatctgtgcttaccgactctatgggctcccattatcttcattgcgtgtcagctgcttgcccgtcgagtcgtgtccacagcttcctgattacgcctgaattcagaaccacgttggaccttggatcttgcatcctggatccacctgagtccagatccagatccatctcagtctggatccagcgcagatccagatccatctcagtctggatccagtgcagatcaagattcatgtcggatcttggatcctggatccacccgagtctagatccagatccacacgttggatttgcgtcctttcactgtcactcttccggatttgtgccgaggtccagatccgtcactcgtctcatcactgctataactcttctccgggaattgcgcttctccaccggtgtcacgttgagcggattaagcgcgaacgagatcgtttgcaggagaataccgatcacctggcaaccgaagtagccgttgctggtgccaagatccaagatcttcagcgtcggagttcggatcaagagcgtgacttgcaagatgcaaacaacgagcatgacctagccgagcaaagctcacgctgtgcgcaggaggctcttcaacgagttgcagcgaagctcgaagtgaggcgaggccgatgaaacctttgtcgcccagtgggggggggggttcgtatagcgcagcccaagactgttccccaggggtagacccagagaatcgacttgagagtcaacagcaagaagatagacccagagattcgcagccgcaaagctttaaaccctgagaatcacactccttggttgatgtgggtaccttgtgtaatccctgtcggctcgtttgtcttcgacggaacggcactccaccgtttgaaaatgtagcctcgaagaagtgcgggaggcgcacgtctacttcagaacgcacctccacaccaaaaggcaaacccagagaatcagatcccctgaaacccagaatatcacgaattcagggtccaggttttcagtcaactctgggacttggaactcagaagacaccttacccaaatgtctcctagctcgataaaacctacaaatacagagtatacaaacactacaactagccgtcacttattcttttggacccttggacggtgggtcacacacacacactaggctcactcgagtctgaaattcaggggcctagctcccctgatactcacacaaacgcgcaccacctccaataaacgaggaaaatacaatcactatcagttaccttcccttcacacaagcagtcaatacaaaatcctggaggcgactacctagcaccccagaataccctctggaataatatgaaatgggctaccacgagcacagcaagtgacccaactaggatatggaatagatggatcaccccaggaaactcacggccgtcgctggtcaccacctaactggacttgagtttgatggagcccacacagacggctgtccttcgccgttgatatgcccttagcgtcccgtggtcgtagtctcgggtcctccggatttccgtcggcaggcttggccgaagtcacttgcgcagtacagggtaaaaggaactctgtttggtttttatcagctacttctctctctctctctctctctctctctctctctctctctctcttcttcgggcaaatatcttctgttcactatgcttggggtcaaaatgtcttggtttagtatggtacaggactccctctcgactcctcgaaagtatccagtctgtgcatccatgacggttcttcaaggtcacgcatcactttgattgcagactgacttcgaactgactcgaatccctgaaaatcaggtgacactcagggtcatcttctgaaatcctgggaattctgaggaatcttggggaattgtggggattcttgggtgttggctcgggaaacacttaagttcagtatagagagtctggatttatggtccaaacccagggaatcatctttggaactctgggtcacctgcactcagggaggtaaactctgggtcatcgtgcggcactctgccaattgtgggtccttagacttggtttagtatggtacaggactccctctcgactcctcgaaagtatccagtctgtgcatccatgacggttcttcaaggtcacgcatcactttgattgcagactggcttcgaactgactcgaatccctgaaaaccaggtgacactcagggtcatcttctgaaatcctgggaattctgaggaatcttggggaactgtggggattcttgggtgttggctcgggaaacacttaagttcagtatagagagtctggatttatggtccaaacccagggaatcatctttggaactctgggtcacctgcactcagggaggtaaactctgggtcatcgtgcggcactctaggttttccgtgcggcactctgggtaacaagtctgctgcagtgcagactcgtgtgtatctcctcaaagccacacttttagtgggtttagtggcctcctgcgcatggtcacagtggtagtgggttgattcccagggtaatttgatcctctggggcactctgagccacagcaagatgaggtgtactctgggatacattctccagagacactttccgccagactttaggcactcatcgtaagggaaagtccgcggctgggctgagtgttctctgaaattctgggcgtgcactcccaggattcacacttccagtcagttgggcccatctgcggtcagacgctggattcatcccgagaaatcacttctctcccacagtcgccatccatgtcacacgggtacagccgcgccgtatccaagtcatccaccaatcagcatccgatacaaactccaggtcacagaggtgacggcacatcgtcggcaattttctggggaccgcctcgtgtcaaccgcccctcctggtccgggtccatcaaagaggaaatcgctccgaactggtgaaccatggccaagcctcaaaaacatacaggtccatccaccgtcgacttcgacacggccgttgcactctgtcgcctcccagggtttcactcactttggcggcaccctgtctccccaacggttggtcaggacctatcttcaaggttctcctctcaaacgcaaaaacaccaacgggcaatgcgcggtcacatcgccatttcgcagatcgtcaacatggtggagagcgcgacttcggacggcaagcaagcgacggcgccagctcaaggcacggcgccccccgggagcgcgccacctcagacacagcagcgcaccggcggcgcccctgcgagcaccgcaccaacaggcgccggcagcggccaggcgggtaactcagcgtcccgagacacttcaacgggcagcaccaagacggacgtgaccaagcgcatctccttctccagcgccaccggcaagacctccgacgcggacatgcgcgaggccgatggcaacgcctcgactgacgctgcaacccaggaaactggtgacgcgaactcagagtccaaggctccagacgcaggcggcgtggctccggacgtgggcatggagggcgcccctgagttcaagttaccacgacacgcgacgctagaggacgtcaggggactcatcttcgcaggcatgcttcggcaggaggtggtcgatcccctgacttcctggtccctgaacgccccccgcactggaaactgccggctccgccgaatctcaagaccaacgcgtatctcgtggggtcccagggatcgtgaacgacattcgcgcgggcgcgttcgccatgaaaggctacggcggcgcgaccacgttgatcggcttcgaggagctctccgacgaggatcttcaggggttgaaggaagtctgtggcgccgacgctgggatcgatgtcctatgtccacgtcgttcggctctttcagcgttcgaactggacaataccctgaattccatcggtattcgacgcgagatcgcctcactcctgcgtcacttcaacagcacaaggctcgctgagcgcgtgttcaagatgaccggttacctgcgtcgagtcctcggggcctaccgaaacatgcgttctgtggctgactctcagcagggtttcaccgccactcaggaagtattcgacacgcgacgcaagtacaaggaactgaagcgcgcctggaaattcacgtgcgactactggttcctggaggtccaagaggccctgggcaaggtggatgacgctgagtccaagtacaaagtcgcgctgggcgagcagaagacgcggtatcaagacgagattgattctctggagtccgaaaaggcgcaactcaaggcgcgccttgccgactctgaggcacaagcgcgaatcctgaaatcgcgtcttgagtcagccaccgtggacccctggaagttctccgatttccttcaagagcacacagacttcacgggtaattgggagcgcctccacgacctcttcaagctctgcatcaagggctcgaagcatcctgggacactgtcatcaacgtcacggccatggacaagcgcaaggctgcggtggccccgtacccagagaaaagcacacgtatgcctctgtcttcggggtctggatcgtccggtcgtcctgaaattctggttctcacggatcctggcagcaagcctcgcagcggttcgaagaccgggggcaaaactcaggattccaagaaatgtcagggttccaagaaagtcaagaccccagaaaatcacgggattccaaggcgccgggcgagtcgccacggcagtcggcgcaccctaagcctcacaaagttcagcgtcgccccaaggatcaccaaccaggccgcgactctgtgcgtcgcgccagcgagaagactgtggtgtccaaggaggccgcacacacgatgctcccgggtggtgtcgtctggaaggaagttcggcccgacgcacgtcaggccattcttgctgggctcaagtacgacacagccatggagtggattggcagcgaccgggcggctcacgggcacttcaggcagccgcagctgatcaagatgctcgtgagcatgatgtactggcgtcgtcttgacctgactccctggagcaagtacgtccctgaagcctactacgaaacggcagacgagcgtctggacaggtgccttcgacgcagtgatgtgccaccaccctgggggaacctcgatgaccacatggtgtaccctgatgaggacgccgattccacggtggacgacatcgagaacgacccggactaccagcctcccgcccaggaacctgaggagagcgcctctagtaatagctctgaagaggaggaggtcgcccctgaaactctggaggacatcgaggatgcagaggacgacgacgacgctgaggacgacaatggagtaggagaacccctggaagtcaagcctcctgctaagcgctcccgttctgagtcaagcaagaaagctcagggttccaactcgaagtcgaagaagaaacgtcgcacgggaaacaagacagacacttctgccactcagggttctagtggtactcaggggtccaaggctacatcacgctccaagcatccgtcgacgctcgcgcggaaatcgtactcggagctcacttgaagtgagttgatgacggccgaagaccgtgaggacaacgagacctcctggcgcatctatggggttcttgttcaatatccaagttcgaccaagagtgcgtcttgccagactcccgggttcccatagtacgagatccacaagtattcgtacgacggtgctcacgagcgttgggaccgtgaggcataccaataagtcctggattctgaaccctgggagactatgcttcagggtcgcttccgagtgttctacttccatgagcgagaactactctccgcgaaagcgctcaagctgatggaggacgtcgtggacatcatgcacaagcacgcacaggcaatctgggagcgcgggcactgggtgcctattccgactgaagaacaagcagacgccaccatggaatctcagcggaagtcgcgtcgaaacgcgctacgcagagcgaacaagacgctcgtcgagcgctcgcgcaacacccctgggttcatcccgtcgttgtggcacgaaccgggtctctggaagttcccggacaagtgctgctactggatttgggaggatcccagggccaagaaactcgggggagctaagtgcaaggacttagacgtccagctagcggcgttggacattcgcgagcctgctcgagtccaatggaacacggcggctgacgacgatcagtggctacaatacgtgccgaacaacatcaagcaccacatcaagcccctggccatccgcaagctcaacccgctgtctctcaagcactcgtgagagtcaaggtcacctccaaatcccgagaaccacctgaatttcaaatgtcgtagcgtaactctccataatacccaggatttcatctcgatttcaatgtcttccccagaaattcatcattttctgacttgttctctgggtcatccaacttcgtttactgtctccatgtccttgtaaagctcgccgccttcatattccttctcacacactgccaaagcctcagcagtatcaccttctccataatcaaatcaagtcaaatcacattcacgttttccgtctccaatattcacacattccgtcgattttcccagagtttcacagtgtcacccagagtttcccctgaatatcacgtgtaactctgggtcattgtcaccccagagtgctagactcctgggtgatcatctccagtctgcatggcctggaaacgggcccgtgctcttgcgccttgattgaattcgtagagcagggcaccacagttgagcttcgacacaggcagccactcggtctcatcataccccttccacttcacaaggtactcacgaattcgtctcgctgtccgagtccgtttagtccatcacaaatccaggattcgctcaacttcgtactcatcgttcgcagcgttgggctcccaactgtcttcaggcaacagcgccgcatcaaagtcatcattctcgtccacgtcgatctccacagtggaccgcttcgggaatagtgctctgggtttcaaacggctcacgtgtacccagggattcacgcgatatcctgtgttctcgaccctgagtttcacgcggaagttgtcatggatttcctgaattctgaaggggccatgccacatgtgagccagtttgcggctcagcccgggctgcactttgggtatatacagccacacagcatcaccgactgcgaatcctgccttcagtcgttcggacagctctctccacttcctggtttgttcggcagagcgcgcgcgcttggccttcttctgaagatcctcagcgcaagcttgtgcataacaatagtcacgctgtagcttcctgcgccactcgtacgcagtgcgctcctggatcctcgagggcctgggtcctaacattgcagacaccgtgccgtgtgcgtaccagccgtgcaccagaaaaaacggagtgtccaggcgagtggcatcgcacgatgtattcagggcaaacatcaggcgctcagcatggtcgtcccagtcactctggtccgcctcagcaatgtacgctcgaatgctgcgcacgacagactcaccgaccgctcctgttgtccgttcgcctgggggcgatacgctagaatggctcgctgcttgctacccaaaagttcacggaagcgcgtgaacacctcactcatgaaccttgggtcttggtcgtgcctcagcatcgagctcgcgccgaatctcctgaaggcctgctcttcgtacacttcagcgacatcttgcgccgtggtgggactcatgggtttacacatgacgaatcctgagaacgcatcctgaaaaagcagcaggaacgtgttcccacggtccgacttaggcaagtgtgtcgcgaaattcatagacacaacttcaaaagggcgcctcggttcgatgtttccaagggaaggccctggattctgagggcgccccttgccgctggcgcaatccacacactctttgacgaaaacttccacatcagcgtacatgccgtgccagtagaactcagagcgcagcttctcgtacgtcctcgtgatcccctggtgcccaccctgaaaatcttcgtgagcgtagtgcaggatagccggtcgcagagctttcggcaccacgagtctgagttcgtcaaccatgtctcggggtcgatctctggtagaccgactcaagcggtacaggacttctctggaatccaacacgaaatcatctgcgaccttcgcgagtttcctggcttgagcgtgcgacagcttcgtcgtgtctcctttcaggaaatccttgagttgcagcaggtgatcatctttgtcctggtgcactttgatgcgtcgccagcgttccgcctggtactccagaggtcccatgggttcgctttgggcttcgatctcctgagttcgcgcccgagtcattactgcaaacactttggccgccacaggcaacggagcgcactcaggtccagggatacccagagtttcgacaccctgagaatcactcccctgaattccgacgttcaataacaccttcggtcttaccaacttctcgtgaatcttggacaccaactgcagatgtgttcgttcgtcagcatcctccaccttccaggattcaccaagcgcgagggtcttagacgtcaggtagtctgcggcctggttaaactctcgcttgacatgcaccagccgcacagacttgaacttcgtcttcagcacttcatactcggccagcttcctctggagatttggctgattgcagttgatgagaccctgggcttgctggatggcaatcctggagtccccaaccacaacgatgtcctgaattccacgctcaatcgccagagtgaggcccttcagaagtccatgatactcagcgtcattcacagtcacgtcctccaggatgaatccctgggcatccaggatttcccaaccagggacatgccacagaatgcagccacagctcccttgtcgcgtggaggtcttagcggtgccatcgaaactcagaatacacccctcatagtccgcttccagcatttccgtactgataggcactggaggtttaacgcgccccttggctgggatcaggttttcagcgatctcatccaagtgtactctgggggtaatacccgcacctagaattgcagccaagccgtcttcatcccgttgaactctgcgtatctccaggttccagtgggacaacttcagaccccacttcaccgttcgaccgtctgccgactgcgaggtcagcaaccacttcaacacagaatatcgcgtatagacgacaatcttagggctgccttcaaccaaagtgcgaaacacctccaggactctcaggatagcaatcacctccttttccgcaatgtgataccgcagctcagcgtcattcaggacgcgacctgtgaatcgaaccgggtgcacaatcccgtcgtacccctgacccaacacagcggatgctgcccacgggttcgcgtggggaataatcacgaagggccttgaacgatcaaaatgtctgagtaacggagtcgaaataatcttgtgcttcagaatttcaaaggcttcctgggctctcgacaggtctctcctggatttcacttgttcctcagtcagctcgtacaggacggccgcgatcacgggtagatcttcaatgaacttgttgtagtaattcagactccccatgaaactctggacgcctttcagtgtcgtcgggaacggcaagtcttggacccccttcgcgattttaggggtcgctcggatgccctcagcactaatctcgtgagagaggtacggaatggacaacttcccgaattcgctcttgggaagactcacagagatattccagtaacgtagtcggaagagcagcgcgttcagatcctggcacagctgctcccaagtaggcgcaccgtgggcgatgtcgtcgatatacgagcttcgacccaggacagggcccatctgagagggagccggggtgttacgctgaaaaacagtcatctcatccgttaacactgaaagtcgcggtgcattttcacctgaaactctgggttccccagagttcaaccccaaaacgtccaagacatcttggtcaacctcagcttcttcctcaggggaaagccgcagaaatccccacatacagttattgagaactgcttggtagatcagcggcgcgttcttgaggccaaacggcatcctgacccactggtagtgcccatagggacagacgaacgcagagatcaacttggctctctcggtcatcttgatagcccagaaaccactcgccatgtccaagctcatataccacatcgccgactcaaagccaatcaaaagatcatcaataagcggcagcggatagtggagagcttaatgaagccattcaccacgcgatagtcgatgcacatccggatgtcgacgccattcttcttgaggacgatcacgattggagatgcccagggggacgtagaagtctcgatcagcccgttctccagaagcttcttcagaagttcatacaccttagtccacaggtgtggtgcaatggaccttggacgctgggcaacaggtttagcgtcgtctacatccaggtcacaaaccactccacgggcaggtgggggagctgcattgccgtctcccaagaagatcttccgatgatattccagaattcgcctcacttggtcctccatctcgggcgtcgttttcccagggactccaacatctgcctcctcgatcttgcacttaggggtcaagtcacgcatctcaggaagcataaccaactggtcacgcatctgagagagcaactcacttccttcacgtatgtagaccgcaggctcatagtcgaggtcctctgtcgaaagccgcatgcagcgctcatattcctgcttcagcttctccaacggagttcccggcatctctgagatcgggatatcccagtaatcttcaacagcatcctgagaatcgtcgtcatccacatcgaatcccagagaatcaccttcgtcgcaccactgaccctgagaatcactgccaacttcaacctgtaaactcagagtttcagcggccgtatcaccttcaggactcatgccctctggggttccgacagtctgcgaggcaacatcggtcaccgcctccttcagaacgtcacccaagtcactcgtatcaacagcaacatctcggagttcaggagggtcttcaggaggcactccttcagtctgagttgcagcgtcttcagcgaagcgcacgcgacgaggcttcggtttcctgagaatcgaggcaagcagtgccatgtcggggccctttgcaggtcgcggcagaatcttcgtaggccactgttactctgggcctcgacacaggatggctcaagcgcagccaggtgttccgcccgaagtctgccctcacgccactgaacactctccagaataagcgtctgccactcccgatacgtaaacgaaccagggcgcacaaagcgtccggcacgtgggaagaagccgcactccacaattcgggcgactggcgttctgttgtgaatccagacgtccttgtccgagatgttgaccaccttcacggcgaccggccaggatctcgcagcgtaaatcaggtgcgttacccagcggtcacctcgtcctgcccacacaacctcacgctgtgggttcgtcggtccatacgagatcttcaccaccttggattccccaggggccaggtaccaactacctgtggtttccacgggcatgtcgacacccaggcgatcatctggagtccatccacacatcatgatcgcctcttcatccggaagtgtcacgagaccttcgcgaacactgatcctcactccagctgcaaacatgaaactcatacccagaagaacttcgatccttcgccgatgttagcaatccagacatccaggagatatatcaccctcgaaccgagagtaatctccacctgagcactggcaccgatgtacgtcggaacgcctacaccttggtttgcttatgcgacttgagtgtgagtccgagcttacgcgctaagtcgaagctcacaatattcacagtcgcaccggtatccaggagaactctcgtccggcagtcgttcacagcaccatgcaccatcgccacatcacgtttctttgggtcaggatcattgttttcccaccatccgtagcgctctccagggttcagcttgtactccacaatttcttcagagttcaccgacccagagttcgcttgttcaggatgctgattttcaggggaagtcatgaaatcctgagtcaaagtagtcatgcattgttggttatcttgggttcttgttctcagctccgggcctacatacactagaacacataacgctggggccttcttcagcccggcgcgtactgggtccccacccagcgggcttattggtttgacggcctcccagagtttgcttcgccacccagaagtttatccaggatttggctcggcatgttcttcagtgcaccttggcgggcgagtttcttcacagcttccagtgtcttccagtctccagcagtcttccagtctccagcagttttcctctgggtgctcccatatgccgcacttctcgtagaacttgtcccaattcgggttttcgcggcgaggggaacggaatccagagttcgtgttcggtcctggttgggcgttcggtggacgccatcccatgctatccatcacgcgatagacctcgttcgtcagcgtctgagtccgctcggcacccttcatactcgccagactcccagcgctaggcgtagaagcttcttctccagagatctcacgagttgaccctgaattcgcgctcgtgcttcgggctgaaactctgggttcgtccgtgatttcctggaaacgcgcgtgaatttcagggtcttcgtctgactcagagtcagagacatcgcccctagtcacatacgcacgtccttgtcgcttcggcttgaaacgtccctgaggaatgttgtcagcacgaaagtcacgaactctgggtggcggagcatcatggtcgctgcggctccagccatcttcgtcctgttccagggcgtactctagatcagcgatactcctgaatctctggccctgcagcgacgtcttgaggcgcgtgtccctgagttttgtgatgaacctccggatatgtttctccaggcgcttcgaagacttgcgaaagtcaatgtcagccttccccgcggcggaattcagacgataaaagaaatccagggcgctctctgaattcttcatctccatcgtcaagtaacgttcagagtacgacgagcgcgctttgcagtacttcttcctgaatgcagacgccaactccttccagtcacgctgagtgtgtttgggcaactggttgaaccagtcacgcgcagctcccgagagtttcaacttgagttcctgaattcgcatcttcgtagaccaacctccctgagccgccatgttcgcaaaacgctcccaccaatgcacgcgttccctgagtgacgccttagtatcgaactcacccagagtatttgagttgatgtacggtctgaacgtcaggagcgtagtgccagcttgagccgtagaggccgtcgtcaggttaaccccaggattcccgtccgaactgtcatccgaactctcagaggacgagtcatcatcgctggaatcggagcttgggtctgagtccgagggtggattgacatcctgacgcttcttcttctgctgctggtgtttcttgggtgcagagcgcttggagtctgttttagagtcctgtgaggccttagaggtcgctgttctcctgggatccgacgtcttccccagagacacaggctcgagcttgacatcctgcgtcaccttggtctccgtagcgccatgtccccgcttgacgcgcgcgattctgccggaagtgtcggcaggagtctgcgcgagggtcgctctcagctgggaggcggcgacttcggacgtgttctttggatcagctgtctcccgtctctggcctgtgacacttgcgtttccgttgattacgccactggattcttggggtcgggttgcaagttcagggttctgagccactgacgaccccacatttgttgccaaatcaggggcgacggttgcgcgacgcgcttgaacttgggccaatgttgcacgaaggtcgcgcacttggccggcgtggaagcgctggatattctcggaagactcccgctctcgctctttctccgcctcaagttattggaccttctgctccatagttgacatttgttccttccaaccggcgtaggtctcggaaacccagcgcgcgctccgagtcggcttcggcttcgtgctgttgccagcgctcggcgtaggcggcattcaggcgctcacgctcaagacgtgatactctgggtcatcccctgagtttcagtagaactctgcgtcctgcgcacgccgttccgcttctcctcaggcgatctcagcgtggacctagcgatccgtaagttcctggatctggcgacgcgcgtccaggtcacgttgttccctgaggcgctcgcgctccaaggcatccaggcgttctctggcgagaaactcgcgttgctcatgttccatgcgggcctgccactcctgctgttgtcgcaagacgttcagctcgatttgggcgggcccagacctcgcggacacggacgaaactgacccaagattcctggatccactcgagcggctcgacgcagatgattttctggatttcgttgagcgtcgagagcgcacctcgctcttagagctctggtgttgactccgctcatcggcgctgacatcccttggaccaccaaatccagtaatcggggcagaaaccctgagtttcggctcggaagtcgtggctgaaatcctggggagaccggccttcctgggtgcgatctctgcgtcagagtgcaccgacgatgccatctcaacgtcatcttggtcgactgacacaatacgcgatgggatgactgtccgggtaacctgaaatccaagatcaccggcagctgcaaagccaccggcattctgagccacaagcgctagagctccaactcgttgtccaagcgacatcatcgacgaagacgaagagctaccataagacgtttgaacgcccgaggcagtactctcatccgaagcgcgcgaggtaccgatgacacttggcaccgcgcctggggtagtggccttggcttccgcctccagagaatcacgtccattggacacggaattcaggggagtggaattctgaagcgaggcaccagtcgaagacttgtacgctggaagagaggacagcgacggtgtagacagcgcggatggcgttgacgggacttgtggccgaggcggtccatgctgagtacgcttggatcgtggctcaccaccactcgaccctcgtgggctccgtgaaatcctgagtccagtgactctgaatctcaggtcaaactgtcggcccagtagatccacatcgtagtctgtcatcaatagatcaccgtctccatcttccttgtggtagtccagccttggtgcttgctcttgggcgcttggtgcggcgtgatcttcagagtttaccttgaaagacacaccagctatcaccaatctccactcgaccagttccacggcgatgaaattctgggtttcctccatgacagagcgcaccagactttctggaatcctgggagcacgcgtcgaagaccagccagggatcaaattgacaaactcaaatccggcttcgaagaacagagtctgcagaatggcgacgcactcgcgggtggtcatgatactctggggaatcgtagtcgccatgagatcctgagcagttccgacgccccaccgggcgaggtgaaactcagagatccaggcttcatcttgatcctccagagacatgaggtagtctcccgttgcgtacgcggccgcgaagtacgagttggcatccggtttcggagtcggccactcataaacgacacttggcggcgtcaccttcccaggattcaccacttcccagcgtcgaacttcacgtcgaacgtacagcaccatgctcctggcgtccaacgccgctgctcccgattccggagcaggcgcagcagcttcccggatgtcgctttcaggcgtcttcctgggtgtcgcttgcgaacttggcgctgaaactctgggttcaggtggtgcgcacccagaattcaccttggaactctgagtcttcgcctcctccttcgctcgcacgggctccgacttcacttccacaacagactcgtccgaagatgagaccaagtcaaccacctccgggggctcaaccgcattggcgcctccctcagacgcctgaacaccaccctcgcgggtgtgctcctctgggacttcaggaatccgcgacccagaattcacctccgtcgaaccttggaacccaggggaaacttattcctcctgagtttgcgatccagcagcaggctgaccttggactgcagacgcctcgacgtccccaccttgcactgcctcgctctcgcgagcagccttcttcgccttccgagcgtcgcggacgactgtttccaggtccttgtgctcctcaggctccataccttgaacacgacgcgactgacgtgacgcctcagtacgtcctccgtcaccgcgtccactcttcttcgcccctcgtcctccaggcatcttggtagcttgaagttgacgggcactcaacacttcttcaacacttgattccgatgaaatcctcgacaatcgaatccgggcgcgcgcaccagctgaggcgaggccgatgaaacctttgtcgcccagggggggggggggtcgtatagcgcagcccaagactgttccccaggggtagacccagagaatcgacttgagagtcaacagcaagaagatagacccagagattcgcagccgcaaagctttaaaccctgagaatcacactccttggttgatgtgggtaccttgtgtaatccctgtcggctcgtttgtcttcgacggaacggcactccaccggttgaaaatgtagcctcgaagaagtgcgggaggcgcacgtctacttcagaacgcacctccacaccaaaaggcaaacccagataatcagatcccctgaaacccagaatatcacgaattcagggtccaggttttcagtcaactctgggacttggaactcagaagacaccttacccaaatgtctcctagctcgataaaacctacaaatacagagtatacaaacactacaactagccgtcacttattcttttggacccttggacggtgggtcacacacacacactaggctcactcgagtctgaaattcaggggcctagctcccctgagactcacacaaacgcgcaccacctccaataaaggaggaaaatacaatcactatcagttaccttcccttcacacaagcagtcaatacaaaatcctggaggcgactacctagcaccccagaataccctccggaataatatgaaatgggctaccacgagcacagcaagtgacccaactaggatatggaatagatggatcaccccaggaagctcacggccgtcgctggtcaccacctaactggacttgagtttgatggagcccacacagacggctgtccttcgccgttgatatgcccttagcgtcccgcggtcgtagtctcgggtcctccggatttccgtcggcaggcttggccgaagtcacttgcgcagtacagggtaaaaggaactctgtttggtttttatcagctacttctctctctctctctctctctctctctctctctctctctctctctctctctctctctctctctcttcttcgggcaaatatcttctgttcactatgcttggggtcaaaatgtcttgtcttgagtataccttgggatcagcggtccaatcttgcgatcggcttgcgaatccattgtcgcacggcgtcgaaagtgccaattgtgggtccttagacttggtttagtatggtacaggactccctctcgactcctcgaaagtatccagtctgtacatccatgacggttcttcaaggtcacgcatcactttgattgcagactggcttcgaactgactcgaatccctgaaaaccaggtgacactcagggtcatcttctgaaatcctgggaattctgaggaatcttggggaactgtggggattcttgggtgttggctcgggaaacacttaagttcagtatagagagtctggatttatggctggtagtgcccatagggacagacgaacgcagagatcaacttggctctctcggtcatcttgatagcccagaaaccactcgccatgtccaagctcatataccacatcgccgactcaaagccaatcaaaagatcatcaataagcggcagcggatagtggagagcttaatgaagccattcaccacgcgatagtcgatgcacatccggatgtcgacgccattcttcttgaggacgatcacgattggagatgcccagggggacgtagaagtctcgatcagcccgttctccagaagcttcttcagaaggtcatacaccttagtccacaggtgtggtgcaatggaccttggacgctgggcaacaggtttagcgtcgtctacatccaggtcacaaaccactccacgggcaggtgggggagctgcattgccgtctcccaagaagatcttccgatgatattccagaattcgcctcacttggtcctccatctcgggcgtcgttttcccagggactccaacatctgcctcctcgatcttgcacttaggggtcaagtcacgcatctcaggaagcataaccaactggtcacgcaactgagagagcaactcacttccttcacgtatgtagaccgcaggctcatagtcgaggtcctctgtcgaaagccgcatgcagcgctcatattcctgcttcagcttctccaacggagttcccggcatctctgagatcgggatatcccagtaatcttcaacagcatcctgagaatcgtcgtcatccacatcgaatcccagagaatcaccttcgtcgcaccactgaccctgagaatcactgccaacttcaacctgtaaactcagagtttcagcggccgtatcaccttcaggactcatgccctctggggttccgacagtctgcgaggcaacatcggtcaccgcctccttcagaacgtcgcccaagtcactcgtatcaacagcaacatctcggagttcaggagggtcttcaggaggcactccttcagtctgagttgcagcgtcttcagcgaagcgcacgcgacgaggcttcggtttcctgagaatcgaggcaagcagtgccatgtcggggccctttgcaggtcgcggcagaatcttcgtaggccactgttactctggggcctcgacacaggatggctcaagcgcagccaggtgttccgcccgaagtctgccctcacgccactgaacactctccagaataagcgtctgccactcccgatacgtaaacgaaccagggcgcacaaagcgtccggcacgtgggaagaagccgcactccacaattcgggcgactggcgttctgttgtgaatccagacgtccttgtccgagatgttgaccaccttcacggcgaccggccaggatctcgcagcgtaaatcaggtgcgttacccagcggtcacctcgtcctgcccacacaacctcacgctgtgggttcgtcggtccatacgagatcttcaccaccttggattccccaggggccaggtaccaactacctgtggtttccacgggcatgtcgacacccaggcgatcatctggagtccatccacacatcatgatcgcctcttcatccggaagtgtcacgagaccttcgcgaacactgatcctcactccagctgcaaacatgaaactcatacccagaagaacttcgatcccttcgccgatgttagcaatccagacatccaggagatatatcaccctcgaaccgagagtaatctccacctgagcactggcaccgatgtacgtcggaacgcctcccatgccagacaccttggtttgcttatgcgacttgagtgtgagtccgagcttacgcgctaagtcgaagctcacaatattcacagtcgcaccggtatccaggagaactctcgtccggcagtcgttcacagcaccatgcaccatcgccacatcacgtttctttgggtcaggatcattgttttcccaccatccgtagcgctctccagggttcagcttgtactccacaatttcttcagagttcaccgacccagagttcgcttgttcaggatgctgattttcaggggaagtcatgaaatcctgagtcaaagtagtcatgcattgttggttatcttgggttcttgttctcagctccgggcctacatacactaggacacataacgctggggccttcttcagcccggcgcgtactgggtccccacccagcgggcttattggtttgacggcctcccagagtttgcttcgccacccagaagtttatccaggatttggctcggcatgttcttcagtgcaccttggcgggcgagtttcttcacagcttccagtgtcttccagtctccagcagtcttccagtctccagcagttttcctctgggtgctcccatatgccgcacttctcgtagaacttgtcccaattcgggttttcgcggcgaggggaacggaatccagagttcgtgttcggtcctggttgggcgttcggtggacgccatcccatgctatccatcacgcgatagacctcgttcgtcagcgtctgagtccgctcggcacccttcatactcgccagactcccagcgctaggcgtagaagcttcttctccagagatctcacgagttgaccctgaattcgcgctcgtgcttcgggctgaaactctgggttcgtccgtgatttcctggaaacgcgcgtgaatttcagggtcttcgtctgactcagagtcagagacatcgcccctagtcacatacgcacgtccttgtcgcttcggcttgaaacgtccctgaggaatgttgtcagcacgaaagtcacgaactctgggtggcggagcatcatggtcgctgcggctccagccatcttcgtcctgttccagggcgtactctagatcagcgatactcctgaatctctggccctgcagcgacgtcttaaggcgcgtgtccctgagttttgtgatgaacctccggatatgtttctccaggcgcttcgaagacttgcgaaagtcaatgtcagccttccccgcggcggaattcagacgataaaagaaatccagggcgctctctgaattcttcatctccatcgtcaagtaacgttcagagtacgacgagcgcgctttgcagtacttcttcctgaatgcagacgccaactccttccagtcacgctgagtgtgtttgggcaactggttgaaccagtcacgcgcagctcccgagagtttcaacttgagttcctgaattcgcatcttcgtagaccaacctccctgagccgccatgttcgcaaaacgctcccaccaatgcacgcgttccctgagtgacgccttagtatcgaactcacccagagtatttgagttgatgtacggtctgaacgtcaggagcgtagtgccagcttgagccgtagaggccgtcgtcaggttaaccccaggattcccgtccgaactgtcatccgaactctcagaggacgagtcatcatcgctggaatcggagcttgggtctgagtccgagggtggattgacatcctgacgcttcttcttctgctgctggtgtttcttgggtgcagagcgcttggagtctgttttagagtcctgtgaggccttagaggtcgctgttctcctgggatccgacgtcttccccagagacacaggctcgagcttgacatcctgcgtcaccttggtctccgtagcgccatgtccccgcttgacgcgcgcgattctgccggaagtgtcggcaggagtctgcgcgagggtcgctctcagctgggaggcggcgacttcggacgtgttctttggatcagctgtctcccgtctctggcctgtgacacttgcgtttccgttgattacgccactggattcttggggtcgggttgcaagttcagggttctgagccactgacgaccccacatttgttgccaaatcaggggcgacggttgcgcgacgcgcttgaacttgggccaatgttgcacgaaggtcgcgcacttggccggcgtggaagcgctggatattctcggaagactcccgctctcgctctttctccgcctcaagttattggaccttctgctccatagttgacatttgttccttccaaccggcgtaggtctcggaaacccagcgcgcgctccgagtcggcttcggcttcgtgctgttgccagcgctcggcgtaggcggcatccaggcgctcacgctcaagacgtgatactctgggtcatcccctgagtttcagtagaactctgcgtcctgcgcacgccgttccgcttctcctcaggcgatctcagcgtggacctagcgatccgtaagttcctggatctggcgacgcgcgtccaggtcacgttgttccctgaggcgctcgcgctccaaggcatccaggcgttctctggcgagaaactcgcgttgctcatgttccatgcgggcctgccactcctgctgttgtcgcaagacgttcagctcgatttgggcgggcccagacctcgcggacacggacgaaactgacccaagattcctggatccactcgagcggctcgacgcagatgattttctggatttcgttgagcgtcgagagcgcacctcgctcttagagctctggtgttgactccgctcatcggcgctgacatcccttggaccaccaaatccagtaatcggggcagaaaccctgagtttcggctcggaagtcgtggctgaaatcctggggagaccggccttcctgggtgcgatctctgcgtcagagtgcaccgacgatgccatctcaacgtcatcttggtcgactgacacaatacgcgatgggatgactgtccgggtaacctgaaatccaagatcaccggcagctgcaaagccaccggcattctgagccacaagcgctagagctccaactcgttgtccaagcgacatcatcgacgaagacgaagagctaccataagacgtttgaacgcccgaggcagtactctcatccgaagcgcgcgaggtaccgatgacacttggcaccgcgcctggggtagtggccttggcttccgcctccagagaatcacgtccattggacatggaattcaggggagtggaattctgaagcgaggcaccagtcgaagacttgtacgctggaagagaggacagcgacggtgtagacagcgcggatggcgttgacgggacttgtggccgaggcggtccatgctgagtacgcttggatcgtggctcaccaccactcgaccctcgtgggctccgtgaaatcctgagtccagtgactctgaatctcaggtcaaactgtcggcccagtagatccacatcgtagtctgtcatcaatagatcaccgtctccatcttccttgtggtagtccagccttggtgcttgctcttgggcgcttggtgcggcgtgatcttcagagtttaccttgaaagacacaccagctatcaccaatctccactcgaccagttccacggcgatgaaattctgggtttcctccatgacagagcgcaccagactttctggaatcctgggagcacgcgtcgaagaccagccagggatcaaattgacaaactcaaatccggcttcgaagaacagagtctgcagaatggcgacgcactcgcgggtggtcatgatactctggggaatcgtagtcgccatgagatcctgagcagttccgacgccccaccgggcgaggtgaaactcagagatccaggcttcatcttgatcctccagagacaaacgccacttgaggtagtctcccgttgcgtacgcggccgcgaagtacgagttggcatccggtttcggagtcggccactcataaacgacacttggcggcgtcaccttcccaggattcaccacttcccagcgtcgaacttcacgtcgaacgtacagcaccatgctcctggcgtccaacgccgctgctcccgattccggagcaggcgcagcagcttcccggatgtcgctttcaggcgtcttcctgggtgtcgcttgcgaacttggcgctgaaactctgggttcaggtggtgcgcacccagaattcaccttggaactctgagtcttcgcctcctccttcgctcgcacgggctccgacttcacttccacaacagactcgtccgaagatgagaccaagtcaaccacctccgggggctcaaccgcattggcgcctccctcagacgcctgaacaccaccctcgcgggtgtgctcctctgggacttcaggaatccgcgacccagaattcacctccgtcgaaccttggaacccaggggaaacttattcctcctgagtttgcgatccagcagcaggctgaccttggactgcagacgcctcgacgtccccaccttgcactgcctcgctctcgcgagcagccttcttcgccttccgagcgtcgcggacgactgtttccaggtccttgtgctcctcaggctccataccttgaacacgacgcgactgacgtgacgcctcagtacgtcctccgtcaccgcgtccactcttcttcgcccctcgtcctccaggcatcttggtagcttgaagttgacgggcactcaacacttcttcaacacttgattccgatgaaatcctcgacaatcgaatccgggcgcgcgcaccagctgaggcgaggccgatgaaacctttgtcgcccagggggggggttcgtatagcgcagcccaagactgttccccaggggtagacccagagaatcgacttgagagtcaacagcaagaagatagacccagagattcgcagccgcaaagctttaaaccctgagaatcacactccttggttgatgtgggtaccttgtgtaatccctgtcggctcgtttgtcttcgacggaacggcactccaccggttgaaaatgtagcctcgaagaagtgcgggaggcgcacgtctacttcagaacgcacctccacaccaaaaggcaaacccagagaatcagatcccctgaaacccagaatatcacgaattcagggtccaggttttcagtcaactctgggacttggaactcagaagacaccttacccaaatgtctcctagctcgataaaacctacaaatacagagtatacaaacactacaactagccgtcacttattcttttggacccttggacggtgggtcacaggctcactcgagtctgaaattcaggggcctagctcccctgagactcacacaaacgcgcaccacctccaataaaggaggaaaatacaatcactatcagttaccttcccttcacacaagcagtcaatacaaaatcctggaggcgactacctagcaccccagaataccctctggaataatatgaaatgggctaccacgagcacagcaagtgacccaactaggatatggaatagatggatcaccccaggaagctcacggccgtcgctggtcaccacctaactggacttgagtttgatggagcccacacagacggctgtccttcgccgttgatatgcccttagcgtcccgcggtcgtagtctcgggtcctccggatttccgtcggcaggcttggccgaagtcacttgcgcagtacagggtaaaaggaactctgtttggtttttatcagctacttctctctctctctctctctctctctctctctctctctctctcttcttcgggcaaatatcttctgttcactatgcttggggtcaaaatgtcttgtcttgagtataccttgggatcagcggtccaatcttgcgatcggcttgcgaatccattgtcgcacggcgtcgaaagtgccaattgtgggtccttagacttggtttagtatggtacaggactccctctcgactcctcgaaagtatccagtctgtacatccatgacggttcttcaaggtcacgcatcactttgattgcagactggcttcgaactgactcgaatccctgaaaaccaggtgacactcagggtcatcttctgaaatcctgggaattctgaggaatcttggggaactgtggggattcttgggtgttggctcgggaaacacttaagttcagtatagagagtctggatttatggtccaaacccagggaatcatctttggaactctgggtcacctgcactcagggaggtaaactctgggtcatcgtgcggcactctaggttttccgtgcggcactctgggtaacaagtctgctgcagtgcagactcgtgtgtatctcctcaaagccacacttttagtgggtttagtggcctcctgcgcatggtcacagtggtagtgggttgattcccagggtaatttgatcctctggggcactctgagccacagcaagatgaggtgtactctgggatacattctccagagacactttccgccagactttaggcactcatcgtaagggaaagtccgcggctgggctgagtgttctctgaaattctgggcgtgcactcccaggattcacacttccagtcagttgggcccatctgcggtcagacgctggattcatcccgagaaatcacttctctcccacagtcgccatccatgtcacacgggtacagccgcgccgtatccaagtcatccaccaatcagcatccgatacaaactccaggtcacagaggtgacggcacatcatcggcaattttctggggaccgcctcgtgtcaacgggatgaaccgacgatcggacctccgtcgaggccagatcccacggtgatgcaggacgatggatcgatgctacaggagcaacagcacgcatctactgcccggatggaggaagtccaagatccagtgtcggtcacagatgaagttcctgctgagcgccagccggatccagatccaactgccgatcgaagtgtagacgacgcgttgagaccagacgatggatcaacgggccaagatccgactgacgacgcgcaaggtcgcgaggggacgctggatccagatgatgtgggacaggcggtccagcccgttgtcacatcgggtggtaatcacggagggacagggggcggatctgcaggttcaacaatgcgatatgggacaggccatggatcccatggagcttcaagtttcggatggtgagatgggacaatgtgcagatcgagatggagagacggtgcaggaatcaggtccgacaccggatccaactgtcgatgcagatctaacgactaccatgatccatgccgcagctgatgcagatgagcaagtctgctaccacgtgagtggggatctgcacgcggaagatgttgaagcggagatagcggtgctaccggaagtcactgtgaccacggacgaggtgactattgaagacatccaggtggagatccagaggttaatacgggggaagagatcgatcgacttcgacggcagatctggaggcgccggcacctgctgattggcaaaggcaacgcactgccgcccgcggcacgaggagttgtgtgtgacatcgatgtgtgtgatgcaaaacccattgctcagcgggtgcgcaaggtagccccgcagtaccttgagaagctgtcggatctaatcaaggggctgctcggagccaagatcatcaagaattcgacttcaccgtgggcatctccgattgtggtgatcatcaagaagaacggggtggacatacgtttgtgtattgattaccggctggttaatagtttgacccggctgatggtctacccgatgcccctgatcaacaacctccttgaggatctggacaaggtgctttggtactgctctttggatatggccagtggattctgggtggtgacgatgacggatcgggctcgtgcgatctctgccttcatcaccccgttcgggctgttcgagtgggatccgatgccctttggattgaagaatgcaccccagatctatcagcagatgctagacaacgcattgcatggattcactcggatcccgcggctggaagatggatcgggatcagagcgtgaacttggatccaagcgtggatctggatcggaggcgtcggatctggatctgaagtcgggagaacctgaaggtccgggcaaaccatccgtactgggacgtcggtcgtatattgacatcttggtaaccggtggatcctgggatcatctgtgtgagcgtgtggacgcactactcgacgcatgcgataaatggaatctctcgattagcgtggtgaagagtttctggggcaagagtaaagtggaataccttggtcatcgcgtgtcaaacgcgggattgaaggcgaatcccaagtatctttggcattgatggatctacccttcccaagcacgcttagatccatgcagtcgttcctgggtagtttgaattactactgtcggttcctggaggactacgcgatttacgctgcgattctctacgagctacgtgaagtggactacgccgcgatgagcatcccggagaatcgaggccggatccaagcggtgatggcttccacgactccagacccaacggagcagacctcgtccgacacggtggatctagacttaccggatccggactctagatccaccaaggctatgaagcggaagacttcggatctggaggcgaacgatccaagcagtatagatccgcgttggattcgcgctcatcgggcatttgccaaactgaaagacaagatggcgacgactccgatcctccgacacttcgactcaaatctgttgccggtagtggtcgtgtacgctagtgagtggtccatctcggctgccctgatgcaggagcacgacgggatccactgtccagtaacgttcaccagccgcaccctgaagtcaaacgagcttaactacggcgtggttgagaaggagatgttggccctgttgcagatcctggatctgggttacaacatgttggtgggactcccgatccgagtcttgattagacattcgacgatggcctggttgttcagatccacgggcctacaagagcgattgggacagtgggcggctctgctctcgccgtgtaccctcgagattgcgaagtacacgaagggcgaagatgagatcctgggagctctggcagccagtattacacctagatccaaggtggatcgggctttgatcgaaattgtgcccaagaaggagccacggcgcaagatccaggcgccacggatcgtcgtgtggatccgatccatcatctccgtccggaggttcgcccgcaccgctggcagtcaaggagcggtgaggagaagcgtgctgccgtcggcgctcttcggatctcgattgggagagtccctccaacgtctgagcttcaaacagctcgttcgccatttcctcgtcctcctcctcgtcgctggccatttcgtcgtcgttctcctccccttcgttgtcgtcctcctcgcggttgtcgttgctctcttgatcattttcccccttattttcctcgcggtcgctatcgttagcgtggggatccttgccggcgccgaggcgtttgctggagtcatgatctctctgtgtggcatgtccaccttcttcagcaggtgaatcctgatgacccccgtcgtcgtcgatctcgccatcggcgtccctgtcatcgggaagagatggggagagaatacgtcgcttggcaggagggtcgggatccggatcggaggtttctgcatcccgatctggctgcccagccgacccaggaggcgccactgggatcaaacctagaatgtacgctggatccaccacgtcttcggtcgcgttgggtcgggcatcggccagggcgcgtatggaagacagctgccatcgcgcgacgttcagctctcgttgcagttcgtctcgctcgtggctcatgcggataagatcctgagtccgcgaccgacgctgagactcgatggcttgcacgcgctaccttaatgaagtcactgtctgctcggaggcgtcgaaatcagctcgaagatccctgagctccgagtgcacttggtccacctcaccatgagaagcgtcacgttctcgacaaactcgagctagatccgcgacggtcgtctcctggagatcccgtgggcgagtgagttcgggattgtggtgaggttggaccgcttgatccagatccgccagggtagccgtgagaacggctcgaaggcggttcaactcctcgcgagcatcgcggtgcatgcgctgatgggcacttagatcctcctgagccttcacgaaatttcgtgtgacctcggccagagacgtatgactgcgatcccgatccagagtcagagtcagagcctcaatttcttggcggtccgctggggggggggggggctggatcctggatccctggcttctgacacgaggcggtccccagaaaattgccgacgatgtgccgtcacctctgtgacctggagtttgtatcggatgctgattggtggatgacttggatacggcgcggctgtacccgtgtgacatggatggcgactgtgggagagaagtgatttctcgggatgaatccagcgtctgaccgcaaatgggcccaactgactggaagtgtgaatcctgggagtgcacgcccagaatttcaaagaacactcagcccagccgcggactttcccttacgatgagtgcctaaagtctggcggaaagtgtctctggagaatgtatcccagagtacacctcatcttgctgtggctcagagtgccccagaggatcaaattaccctgggaatcaacccactaccactgtgaccatgcgcaggaggccactaaacccactaaaagtgtggctttgaggagatacacacgagtctgcactgcagcagacttgttacccagagtgccgcacggaaaacctagagtgccgcacgatgacccagagtttacctccctgagtgcaggtgacccagagttccaaagatgattccctgggtttggaccataaatccagactctctatactgaacttaagtgtttcccgagccaacacccaagaatccccacagttccccaagattcctcagaattcccaggatttcagaagatgaccctgagtgtcacctggttttcagggattcgagtcagttcgaagccagtctgcaatcaaagtgatgcgtgaccttgaagaaccgtcatggatgcacagactggatactttcgaggagtcgagagggagtcctgtaccatactaaaccaagtctaaggacccacaattggcactttcgacgccgtgcgacaatggattcgcaagccgatcgcaagattggaccgctgatcccaaggtatactcaagacaagacattttgaccccaagcatagtgaacagaagatatttgcccgaagaagagagagagagagagagagagagagaagtagctgataaaaaccaaacagagttccttttaccctgtactgcgcaagtgacttcggccaagcctgccgacggaaatccggaggacccgagactacgaccgcgggacgctaagggcatatcaacggcgaaggacagccgtctgtgtgggctccatcaaactcaagtccagttaggtggtgaccagcgacggccgtgagcttcctggggtgatccatctattccatatcctagttgggtcacttgctgtgctcgtggtagcccatttcatattattccggagggtattctggggtgctaggtagtcgcctccaggattttgtattgactgcttgtgtgaagggaaggtaactgatagtgattgtattttcctcctttattggaggtggtgcgcgtttgtgtgagtctcaggggagctaggcccctgaatttcagactcgagtgagcctagtgtgtgtgtgtgacccaccgtccaagggtccaaaagaataagtgacggctagttgtagtgtttgtatactctgtatttgtaggttttatcgagctaggaggcatttgggtaaggtgtcttctgagttccaagtcccagagttgactgaaaacctggaccctgaattcgtgatattctgggtttcaggggatctgattatctgggtttgccttttggtgtggaggtgcgttctgaagtagacgtgcgcctcccgcacttcttcgaggctacattttcaaccggtggagtgccgttccgtcgaagacaaacgagccgacagggattacacaaggtacccacatcaaccaaggagtgtgattctcagggtttaaagctttgcggctgcgaatctctgggtctatcttcttgctgttgactctcaagtcgattctctgggtctacccctggggaacagtcttgggctgcgctatacgaacccccccccctgggcgacaaaggtttcatcggcctcgcctcaccgtccacatccaagatccgtggatctgacctggggtgatgggctctggggtgatgggctctggatctgcacctcttccaacatggcaatcttcatacactgacgtaatgcgaatggttgactgcgaggtctgccgacccccaggaactcctcgtcacttggatcttgatccggcgaatcttcggcctgtgggcctcctccgggtactcgtccgctcgtctcttccggtcgctgatctcgtgtccgtgccttgattgaagcttggagctgcaacacctccgccgccccggcgatgtattcggcgatcgcctgaccgggcggatccggcagcgacttgccccgtccacccccggcgctcttggatcttggttccacctgtcggacttaagctggatcctgcctccgcagtattgcacgcggcgtcgggtactcaggacgctccaccatcggccccgtcggggtttctggaggcgccgccgccgcagatccagcctccgtcgtagcctgcagcgcgagattctgccactctaggtagcggcgggatccgacggatacgtaaccttggacccgcggcacttgatcaccggccagccacatccctacttgatggttctggcgcagcaccagctccttctcgccgacgttcgtgatccgaaggtaccgtgtcttgcctgggcccttgatcaccgttggtacccatcgatcccctcgcgtaacccaaagcttgtcgtgttccgatccagatcctcgcaggcgcgtgggtagctccgcggactctccgaccccaagctgcagatagcgatccagcttcaccgactgctgtatagtggacggcggccgctgagttggatccggacttcgtcaggcagacagagagtcccgtcagctagatccagtcggatctcggcagggaccatgtagtccatgccgaggttcgcttcttggccggaaagatctcctacccaaatgtcgaagaaatacaccagatatccacccaaggtgatcttgatccgcgttctcccttccgtcgtatacacgttgtctccgatcccaacgcattcttggctctgactactgtcgatgaagcacacaaccttacgagcaaaggcggtgtccacgatggacacctcggcaccggatctaggagtaagatagccttctcattgttgaccttgccgtggatcttatcctggcggaaccacttgcctggcgaatgttgcttccagtaccctctagattcttcaggtaggagatacgaggactctggatctacaatccgccggcttacagcgacacgtcgagatctgaatcccgaggtggcttcgccttccgctggtttgaaccactgctctggatcctgctgcttccaatagccttgacgagcttctggatctaggtctacttccactgtcgcatcggatctggagtagtcgtcggcttgccgaagacttgagatcacagcagtacgtttcccatgaagatcacatgtattaccgcgtagatcctgtcgtttgctaactggatctgcagatgtcttgttcacaaatgcatagatgcaatatctagaacgctcggctcgtaccggattccaacccggcgagcgtcctagtttaacatcctttccgccatttctggcagcatccccgcatgcttggctggattgaaccactggcggatctggttgtaaaactcttccatcgggcaccggcccacgtcatggagttcaccacacccacggcatacgaagaggtaatggtcacctggatgacccttcttgccgcacttctcacacgtcaaccgcttccagcagccgagatgcgagtgcttcttggatccacagtgcgtacagcggcttcgctcggatctgtcagcgtggatcttggatctctgctcgcgggatgttggatcttgctgcttccggtctagagggttccgttccagggctttcggctcttcctcgactggtttcgcaaggtcgtgggaggcagacaaaaatatcctgcgcactcggagtccgatccatcgctggatccagactcggatcccgagtcaggttggatttggatcgcacgcacatgtttggttggagcgcccggcgcaggcgtcgctggtgctttttgtcggtacttgccggatccatacgcggacttcttgtgttggttcttcgcccgatccaaggcacgcaggacttctttcaactcgtcaccatccggcagtcggagcaatgtcagccgatccgccagatcctgatcgcccagagtctcaatgaaatggtccacatgctcgcgcttctccttggatccaccgtctttgatcttgagtcgagcacggagtccggtgacgttaagtcggtagagataatccagcggagtctcgtccgaacgcttgcgagcatgataatactggcgggcgacggagatccccaatccacagtattgggtctggaagctgcgtaggagatccgaccacatattgcgtgtggatcgaggtagctggcggtaccagttccgcgccgatccagacagcagatccgcgaacgtcaggcatttctcttcgtcaggtgcttgatcgcggaggaatgcagacttcaccttactgacccaagctctcgctcgatcctcgtcttggtccttgccagagaactccttcagatccgagacgccgagatccggactcgttggatcagggctgaacctgtggatccggtcgcggtggtggctactgtagcgcgcgctggggccgggaagtcaatgtcgtcagggtcggactcccagtgtgggtccggattcgatgatccagtggactccatctcgacatcttgggaatcgtgattctgaaccgccctcggtgtcatggctggggttaaagctccctgctccttcaataacctgttcatagctgcctggaagaacgactccaacctgctagtcgacatgtcggatcctgatgtcgtcgctgttggatccactgatggagctgactgcttcttggatcgaggctgggatcggggctgaggactcgattcgcgttggatctgggctcgggcgcgtagcatcgaggctcccgatggtccaagtgacatgcgtcgcggctccgaagacgtgtccgacccaagctctgcagccgacacataaggtgacgacgtccgacctcctgtggatccatcttgtagtgatcttggatccgggattgcgggatccggcttcggctggatctcgcctaccatcaccttcagccggttcaacaacatctccgtcgtggcacggagttggattggatcgatctcgtacatcactgacgcgtcgaacgctccagccacgagaccggcatccctcagcagctgcatcaggcgttccatctcgggcaagattcttggacgcttaacagctgccggaagtgtcaggggtccctgcagggctcctatctgcttcacaccaaacttctgcataattggatccactgtcagaaagctgcgtagttgcttctcgcgatgacggagccatgatgcctcggatccatcctgggccggggtttctggatcttcgtcctccagatccggggccttcatcttccttctcgtggcggtctccgtcgtctggggcttgtctggacggaagatgtagggttcttgtttgactggagagtcagcaaatgcataccggtcctggccggccttggtttgttttgttagtggatcttgactttcgtcacgatccaccggggtccccgaagggacgtgtggaggaggttgaggtttctcttctggatccatgtctggatccacctcggttccgccgacagaggtcctccttgcactctgccgatccgtggatcttgtttcattcagcagcgtcgtcgtcgatcccgactccgaagacgcttgatctccttgttccttcttcactcgaacttcttcgtgggactcacgtgcacttgaaggtagttcactaggaaggtttcggatctggccaatatattactccagtcttacaaccaacaccagctctactaccgctaacctctctacgccgtgtaaggccaatgtagttcccgtttccaggcgagggaggaagcgcttgcgatgtacaaggcatattcagttctgatttatgcttaagttcgttcctatctcaaagtcctatcaccatgtggatcctatcatcccatttgtgcttaccgactcgatggcctccctttatcttcattgcgtgtcagctgcttgcccgtcgagtcgtgtccacagcttcctgattacgcctgaattcagaaccacgttggaccttggatcttgcatcctggatccacctgagtccagatccagatccatctcagtctggatccagcgcagatccagatccatctcagtctggatccagtgcagatccagatccatgtcggatctggatcctggatccacccgagtctagatccggatccacacgttggatctgcgtcctttcactgtcactcttccggatttgtgccgaggtccagatccgtcactcgtctcatcactgctataactcttctccgggaattgcgcttctccacatcaccttggctcatattattggtcagatctcatccaatcagattcgcgtcagccttcacggctgaggcgtgtgactcgcctgcgtcatccgggccccttgaggccggagactcttcctaattcgctgaaaagtgggtgtcgaggtcaacacagttccttcattagctgtcggcgacaaggctgacgctacctgctcttgcgcgcgtgctcgcacgcgcccagggcgctccgggacagcggcatttggcgctgtctcgagtagggagtcgcgcgcacctgtcggtgcgtgcgtagcggcaacagggtcatcgctcactgttccgctgtcgcgaccgaagcgcacgagagtgcgcttctaccaatcgatgaccggatcatgccgtacaagccacggcatgcccaatacaatgtcaaacttatcgtccagatccaggacgataaaggtctcgacaaactcttgatcttgatcttcatacgtgaagcgcacgcgtaccatgcgcttctcggtcttctcgacggcacccgttgccagtcgtacctccaacatacttcgaggtatctttaaatcctggaagtcaagccttgataaacttcgcagtcgaacaaagttcttcgacgcgccagaatctaccaaagcacggaaagagccgcttgctctcatcgagttcacgttcaggatgacaagttcaggcttgtcatcttggttcttgtagtgagaatgaatctcactgggggctgcagtcctcagtgtcgcgtgtccaaggtcgacacgcgggactgcattaccagtagggcgccccgcgcctactggcgtccagcgttttttgtttggttgcgacggtgcccggcactgccgcgatagccactctgctggtgcacgggggccgtgcactcccgcgcaaagtgaccgactctaccgcaacggtagcatcgcacattgtttctatgtgactgctggggtccagcagttgcagcactcgagaggtccatgggttctgggcctcccgtcctcactaccaggcgtggctgtggcctcggcacatgagcgtgcagctaagcctgccgcaggctgaactcctcctgtattgcaagagtaattgcagcttcgaaagttgcacgtccgccaaggcatgacatggcgaacgcaaccttcgccaactggtcgacgatacgtcgagccgcaatggcagtgtcgagttcgacaagccaacggaggagaggttcaccctctcttccgacatagttgctcacattgagcttcagcgattacgcgcgtggcatcgtcccggacgacaccgcggtagtagtagcaacatctcgttgctccttcaggatgaaacccagagcaacaccgtgttgctccgtcggcgttagcgcacgcagcatcgtagctacagtcgcctcaccaatgactgttgacagtcgttggagggcctcccactctggatccgacaggtggggacagtcagcgcgtgcaacgtgagttgcaggcgtagtggagctttccatgggcacctctgtatccatgggaaggttctcagctccgcgttcgtgcggtgacgtacgaactcaggtagtcggtcgttggacggactacaaagtgctaccaggtgtaattggcctactttggcccactactttagcttacacgtgtgcgcgtgtatgtgaggaagcgtagcttagtttaaattagagttaattatactcggacctccgagtatagatcaatctaaataaacgatccaaataatgtgtttgggttaaaatgagaactgctatttttgttttatgtttctgaattcctctaaatgtaatattttaaactaggaatctgccaacggctggttggcagaattccaatgctatgcatgtcgctcattggctaaaagatgctgctttcagccactaggaatcctacgtctctatggaccagtcgtggggatcgtaaatgtatgtagcctttggtgtgtctacaccaaggacgagaaagtctttcgaacctttaacatacgtcgagagttacaagtgattgtagccacttgtatcaaattatactcgtactttgtatggagttgattgttccgcaaattgtatgttaagagatgacacatgggtattgaaaaccagccttccgcgtcaccaaccatcatcatgttgcagcgtgtttagacgctggcgctttggacttgtcaagtccgcgtgggtatacggaaagactactgcctgagggactcacatgcaagacagaagccgagcacttatgcgtggcactccgcacggggccccgccggaatgcggggctctgctactattgtttgtgtagggttcacttttatattatttttcagatgggttttgtagcgactcaacttttgatggggggttatttacctttgtgccccacttgtgcgtgtaactctgttacagacgttgtgtacgaccactgggcgtgctgcatcagcgaggcacatgggcacgaactctacattgattggattcagcacgcagttggcaagtgtcactcacgagatttcttcgcctttgaatgcaggtgaccaacgcagaaggacttctgtggcgaaggtcgtgttccagcttccatattgacagactactgggaccgtgctgttgcagttgggtacttttctctagcgtctagtctcagcctaacacaaagggggttgttacctacgaggttttctcctccttaatcccaaagtactccgtgggaaagactcgtgtcttcattgatctcgttgctactgcttcctactcaacacctctgcctgcgcatcgtgccaggttatgagcccaaagctttgaagctctacggacttttttcgtgagccttgagagaaggaagcatgtcgagaacaagtccagcgtcaagtgcgccagttggtgcgtcgaccggacaaggcggcgggtcttcgcaaggcttcgtggtagtgaacgtgcctcccagtactgtggcttctactggggtgtcgacggtgaacctgagtgcaacggctcgtgcgattggaagcgctgctgttggcagagtgagttgtggtactggtggatttgtgagtgctggtactggtggatttgtgagtgctggtaccagtgcagctacgagtatcggtatatctgtgggtgctagtggattggctggtgtcatgagtggaggatttacgtttccaggactggttggcagctatggattggctggaaatccatctcctacagcgatgtctgcggcttcgatgtggtcgcctcctccagcgtatgggttgatgacttcgcaattgatggctcctccgcagtatacaggcagctggtacgagacgaagatggacaacaaggctcctgtgatgcaaggtagctttgacttgtatgcagaagaattgaagacgtttctggtcaaatttggagcttgagggtgttgttgaagatgctgcggctgtgcgtgcgactgtgagtgatgcacagttttgcagaatgaacaatttagctcgtggtgcaattctccgaggtgttccgaaagcagacgctgagctcattcgtcacgagcagagcgcccaggaaatgtggacagcttttgtggacaagcagaccaagagagaatacgcgaactatatcttcgctcgacagcgactagtggcgagcccatttactcctgatcgaagtatggatgactggctacgagaaatgcagctcttacgtcaggagctagtgcactataagcgaggtgtttctgatgaggaattcgcagagattatcttggggaatgtggtgcaaacgcatcgagacgtcgtccgtcagttctcgcggcattatgacccggggcataagagtgcaacttcttcagctgcccaagtcatgaacgctcttcgcgccgagtcggaacttgatgcaaggagtgaagagccgcatggcaacgacatctcgtccgccgaagctggcaagaagcagggaaagcagcctagtcagcaaccaggcaaaaggaaaaacgcgtagtcgaggtcgatacaaggccaaggctaatccagtccggaatgcaggtggtcccagaggaaaacaaggcggcaagaagaatgagaaagaagacaaacgagagtgctggaactgccatcaaactgggcacattcagacaaactgccctcgtccgagacgcaacgatgacgaatcagattcacagcttcagaacgcaaacgctggcagagtaagggcaattctggagcaagtggtggaagaagtggtggtaaccagagaacaattgacatgatttctcgtggtgattctgacgtgaagacagtagctacacagaattcgatgaacaccaaattggagtgggtttttgattctgctagtgactgtcatgtgtgtattcacgaggagttgctttctgatgtgcgccaagatgatggcccactagtgttcgactgggaaggcaagccatctcggaacagaggttggtgaggtggaaattcgagtgaagaatgaaaaccagcccgatgaagcggcaacgctctgtctctcgagtgtgctgcacactccaagtggaacaaacaacttgcttagtctggacaagttggagcaagctggctgggactttgtcaagcccgagaaccacacaagtgcttggcttcgtaaagggaatcaactgctcaagctggtaaaaactcgcggccgatatcgattgcagtccacggtcattccgaaacagcggattgacgcagtgacgcgcgagaatgagcaagctcttgttcgatgacacgctcgactaggacatctgaattttggagctctgcaagaaatgtctagaaataaaactgtgaaaggcatggatgttgcagggagtggctgtgtacctccggatcattgttggacgtgcgtgcaatcgcggatgaagcgaatgtcttacaagaaagtgaagacttcacgatccaaaaggccctaccagaaactcatgtccgacatgtgctacgtcaatgagctgacctacgatggcttcaagcactttcagctcgtacaagacgaagcaacgcgttatgtgtggggattcctgttgaaaaggaaagaccagtctgacgatttggtgatcaagtatgtcgcgtggctgctggctcaaggacacagaattgaagtaattgggtccgacaagggacgcgaactcctgaataacaacttgaaggcatttttgagagctcgtggaattgagtggacgtcaacgcagcccagaggagaatgggttagtggagcatatgaatggggttgtatgtctcgaatgaagagtttgctaacgatggtggacatgcctatccttttgtggggagaggcgttcgcatttgctcttgaggtgctgaatattagtccgagcagtgcattggcgggtgaaactccaaacacacggcgctttggtgagcgaccagagctttctaatttgcgtacgtggggttgtttggcttttgctttcacgcaaaaagtgtagcgcaagagtaagctggagaatccagggaagccgtgcattttcctaggctacgcaaagaactctatcagttatcgtgtgctggatttgcgttcgggcaatattcaagagctaaggacggtcgagttcgcggaagactggacggtggagcgcagctacgtggagaagcttctgctcaaccgattttcacgcggtaaatacaagctcccgtcaaagcttccatacgttcgactgggtgatttaactgcaccgagtgcttcgatgtcttttggcatggcgtcggaagctgagcccagtggaaaacgacattgcagtgaggatcttagggatcgtgactcaagtactgtggtcgatgctccgaccgctgttggcgatcctgcgttggcaagcgtgcctccgagcggaacgttgagcgcgaatccgtcgagatcagcagaggctgaggttcgatcgtcgcgtgcgcgcggactacgcgaatggagatatctgcgtgaccaactggatactgatggagacggtggagttggagctaacggcggcgtggccctgtctaacagcagtggttcagcaccgaatgaggtcgatggggatctgtctaaccgcagagtctctgtacctttagcgagtccgctagctctcaggaattcagatggggatcgcatggagataagtgacagtgactttgatgatgatgatgatgaagccactgagactgcaattggaaatggagaaccgatgcaaaatatttcccgcttcgtggggggagatagagaggatgatgatgaagcagcaaataatccaagtgcatcgtttcgaagatcaactcgtgttcggcagcagaatgtgaggttgcgtgactacgaggttgatatcccggcaagccttgtgattcatgccgtgaatgagctgctcgagccgacctcagtggaggaagctctgagcgcccctggtgcgaaagagtgggttgatgctctcgacacggagtacaaggagctgctgaggaaccatgtttgggagttggtggaccggcctgatggagttaagatcctgaagaacaagtgggtcttcgttcggaaaagaaatgcacaaggtgaagtgtgcaggtatcggacgcggatcactatcaagggttgccaacaggagtatggcatcaactgctgggagacatacgctccagtagcaaaggctgagtctgtgaggtttatcctcctcctagcattggagctgggtctgttgtgccgccaagtggactttgtaactgcatttctaaatggaccgctggatggtgtcgacatctacatggagcaaccggactacttcaatgacggtacaggtcgcgtgtgcaagctcaagcagagtgtgtatggcttgaggcaagcgccacggatctggtacaagatgctcgacaagtacctgcggaagtgtggtttcaaacgcacgaagatggacgctggtgtatatgtgaggacagtgggagagaacaaagtgtgactgtctacgttgacgatcttctgattgttggtactgagaccgacattgagatggtgctgggtgagctcagcagtgaatttaagattaaggatctcggtgaggtgaagcatttgctaggaatggagatcacgtatgtggccggggttcgtgttgatgatttcacagaagggctacacggaaaagattcttgctcgctgcaagatggtcaagtgcaagcctgttcctacgcctcaagtgaagggtaaatttcctatgcctggagacccggagcgcgaacctgtctgtaccaatccggatccagaggtcgactaccgaccgattgttggctctctacaatatctggtgcagtgcacacgcccagatacagccaacgcggtacgaacactggggaagtacctcaattgctttactcgagagcatcatgtgttagcgaagagggtgctgcgttatctacgagggacgtcggactacggcctctagtggacgaagaagaagaagaccacagagcagaggatgcagatcgatgcgtatgtagatgcgtggagacctacgaagccggaagtacagatcgtggcttttgcggacgctgatctaggaaatgagaaggatgatcgccgttcaattactggatacgtgctgcaaatggagggatgtacgtacgcgtactcgagccacaagcagcggctgatcacggacgatacgtgcagttctgagtttgtagctgctgcagagtgttctacaatgatcaagtggacactcaatctgtgcaaagagcttggactgtgtcgcaagcagacagttttgtatgatgacaatcaagcagcaattgctgtcatcaaagcaaacaccggagacttcaaggtgaagggcgttgatctcaagtatcacaagattcgtgactactatgagaagggtgaatttgctttggagtactgcccatctgaggaaatgctggcagattttgacgaaaccgcttggccccacgcagttcagaagactgcgacagcttttgaacgttgaaccaatgtctgacaagcgacctgtgtctggcaagcgcaagcgtgtgaggactgatgaagaaggtcgagattgaaaggcaaggatggtcaccagcaacacgaagtgggagtgacagactactgggaccgtgctgttgcagttgggtacttttctctagcgtctagtctcagcataacacaaagggggttgtcacctacgaggttttctcctccttaatcccaaagtactccgtaggaaagactcgtgtcttcattgatcttgttgctactgcttcctactcaacaactctgcctgcgcatcgtgccattcaaatggacaattgacattttgtcttaccacactgacccaactagcctggatgttgttacaatttgcgtccactggcatgcgaattggacccgttgcgtgaaaagttgcttcctatgcagctcactcacgtacggcgcccatcggtcataagtcacgtcgatcacccacctctgtaagcttcacgcagtacccgctgtggtcgatccactcgacgtcgtcagcgcgttcgacggcgcgataccgatcgtttgcttctgaactggcgacgataattgtgaacgtgacggagcgctagccggtcgactcagttgtcggatatcgctgcgtaagttgagtgtgacttctggcctggaatgtttaccaccattacgcggcactcgtctccgaggtcctgaagcacttgagtgttcacagcgtgacgttggcgctgactccagttgggaggcgtgacgacgagaggccacgggttgatatctgagtgcgccaccatgttatccgcgtcgaggagagagcactgcatccgagtcatgagacggatatacgtgaacgacaattcgtcctgcgccatacactcgggaggagctgcgcgatgcactgtccagccgagtacgtgtccgacggaaggagctctttcggcggggatgcctcgggttcgatgcgccacggcgtcaaattctgcttggtctcaaacacgtagcgggacgttttgctcgcttcatacacgctctgtgggccattcttagcaactggaggcggcacactgcctcagccataagcgacaaagagtgctcggactgctgcagtttcagtagaaggcgaaggttctcgcttcgaagtgcgtcgttctcgagcgctaactggcggaacgcgtgggggagctcagcgtggatcgatgcaatgccttctcttcttggaggatcttgctactgcgctgttcaaagcactcagtcgtcgctggacctcggtctccaagcgttctcgctcgctgcgcagatgtagtagctcgttcttcttgcgtgcgcggaaccgcagcgagttgttgatgcgcttctgccgcctccactcgtcgcgcacttgagtcgtccagtgctccgttgtctgcgcggcccagctttcaaggtgcacgaccgagtcgacgtcgctcacggcggtggacggacaactcggcgacgccatgacgctacaatattgtggtgtgcaagagcttgtctgccgtgcgagataccgtacgcctctcgggccttgtggctgatgagtattcgcggcggatgagtatcggactttcgcgttggtcgtcaagacgagacccgagccaccgacaacgtgtcgaggatgaagactcgcttcctcttagtgcggaatttcgctccaaccacgtgaagcttcctcgcctgccggtaccggtgagaaccatgagacgcaaccacctctaccgaccgtactgtattaacgcacagtgtagagtcgacgagatctgctagcgtctctcgtcaccatatgtgatcgttatccgggctggtgtggacaagacaagaactgtcttactcattcccgccgtgatcaccgtcgaaacgaactgaccagaaatcgaggcgagttgagtagacttgagtcgtccacgccatgacaggagcgcttagctgtggccaggccaacgccctcacgatgaacaccaacgacccgctcgcgctgctccaaagctgggccgcagagacgaccgacgactggaccaaggaggtgcagaaggaggtgaggcgccagaagcgcatccagacctttcttcgcctccgcgcgcgcaagaaacaagagctggctgagctgcggtatgaacgcgatcggctggagaccgaggtccagccacgttttgccgcgatggagatcgtggcgaatcaagagcggacggctgaagtcgacatgagcgacgcagtccgtcgccttgcactcgagtgtggtaacttccgcgcggaaaccctcgagctccagtagagccttctgcagtataaacgccttgtgtcgctattgggtggaaatctggacgccgttgtcccgatccgggccgtcgactgtggttacttgagcgttcgcgacgcgagcatgatctcgcactgggtttcctgcgctgtccaagacgagccagggtggcgggtgtgtttctctcgccgcgagccgtcgttctacttccacccgttctcacgaccggagttcgagtcaagctttgaagtctgcgacagaatgttggccgtgaatttgccgtgctcgtcgatccaaggttcattgttcggctggactgtacgacacgcgccttgagctcgtcgagaggacaactcgagccttgttcacgctaggtttacgacgcgcgtaggctgcagtctcgatggcgcggacgctttcatgacttcggtgcctgtcgatgctgctagtgtgcttatcatcccgccggacggaagtcacccgccgcgagatctcgtcagcatgcaggtgctgcaggagtttgacaaaaatcgctttgtcatggtttgcaacattccaggccaagttcacacccgcttttccaggtagctcgccgactaccattgaccgacaagaacgggaggcgttcagtcacttactcgatggttgttgctgataccgaggctcaccgacgaaatcgagcgattgaagtgccacatccggacgttcagtgggcccacggggccggggtgtgcatgaagttcacggaagtgaatgatactacgatcgacgttagcagcgactattgggctggatgtgaggaccccgagcatgccaaacactattgtgtattgtggggagagtacgtgtgtcagtggttacagttcgtagcgccgccgaatctactcgagtccagatgaagacgttgcaagaattgcgtcttgacctctccacgctggacgaggacatacatatttttaaatctaagaaaatgtttgataacatacataattttataatgcaatgcttgtggcgaatgacacgaaagtcttttgacgaattcaggttcgatttacatgttcctagctaaacatggtcatgtaaatatttgcgaagacggaagatcgagccaagaactaaaatttaaaatttactgcatgtactacgttcagcaaaacttgagcaaatttgatgagagagtgagctgctcccaccttgtgacgatgcggccaaacatcgtaatgtgaccgagcgcttcctggttgcttttgaagcagcctaagctgttgaagacagcgtccactgctccgccgtctgcttcgatcaacgtcagcgagtaccccccccctctcatcggtgacccagatacagtattgggccgcggggtcagcgtcacgactacgagcattcgcctctgagtctgcaaccacatagtaaaacttgtacacgcgctgtccgtcgatcagatcgaaattggatcgcttgaccagacacatgtagcggtagttggccgctcctcccgagtagtagcgaacgatcacggaggaggcgtcgtcgagagtctgcagcgtctggatagagatgtccatgttcagtccctgatccttcgacgtaggcatgatgggccatttgctggtaccgtcctccctgcacatgccgtgaagtaccgtgtcaatggagcgttcaattcttctggagcagcgcacgtgatcgatgatccagtcattcccttggactgcagcaccatggtaaatgttccagccgaggaatgttccagcacagaccaagctcgattcgcgagcggatgagttggtgtcgtgacggctcagaaccgcgttgaattcttgccgagagaacggatggaagaagaaggacgggtctccgcttgggaaatccacgcgacggccagcttgctcggtaattacctgccattgcgagttgatgcagcggactgtgacggcactgggctcctcgattggttcaatggcccttgagtgacgctcgtgggctgcggccctttggatgacttgtaggtacttgaggtggcgtgagagctcctgtcgaagcgcgacgttctcgtcacgtagccctccatgctccagaacaagtcgctgcaactcgcgctgaagtggcggcaggttttccgtgtcgaggcccctccgtcgcagctccacaaggcgttgttcgagcaactgctcgagttgttggtgctcctccagcatactcttcttctcagccgctcgtttgttgcggaatcgtgacatgcgagcgcaatggagttgcaacttgcgcatgtccttgagctcttgcggccactttcgcaccgtgccgcgagactgcacagagtccagcgccggtagtatcagtggcgggtcagcagagttcattacgcagtgggactgtgggaatgagttagcgtaaatttgacaatgagtgatccctgcgtcacgcagtgcgtggcctccgcggtgcgatgatggcagaggttccttcaattcatccgcgatgagtggctcaacttctagcctcacgccacgcgttacataacgatgccgcgcaaaagcaggaggtggtcgagggcacggtaacctatcgttgtggtcggatacagaacggacctgatctgtggtcgggtttcttgcattctttggcattctgggggatgcacccccagacccccgcataaagaaaactaactcgagttgcggcaacgtgtccgctcgctggaatgttcggcgctgggcccgcctccgcaaaaaccgcgcgggtttgctgcggcccctcggtacagtagaatctcaaatgggtcgtatacagaacggacctagcattttatatgagtttttgtatgcttttggtcagatgaaaacacatgttctagcggaagcgaggtcgcgtaaaacaagtttgtcagcgctctatcagactcttagcactacacgattttgctatgatacacttgtcgaagactgaggtcgttccaaccgagattagctactcgctattgaaggtgatcttcgttaaatactttagcaagtccgaatagcttagctcggggcgtaggattgatctaatcggtagtttggcgctatatcggaaatttcacaatagacctgggaaaatgctcaatgacttcgcaaccacccagcacgctgtacttgtcggtcaaactggacacttctggccttacttggcgctggtctcgacgagtccacttgtgtacttaattaagtagcctggttaactaacaaacgacatgcctgcatacagtggagctcgagcgccccgcggagaagcagtcgacagttgcctggttaattcagctcaatgaagcccagcctgcgtggcgtgcgtctgctgctagcctgtcgcgagcttcgatgcgaagacgcgtgaccgcaagcgttgcggtcctcatccgcagcatgttccgcatccgtcgcgacatcgaaggagtaggtgcaggagggatgctaatgacgcgacagtgtttagcatcttaaataagtgagcctaaatagtctacccgaagagattaagcgaccttgtgtgtgccatgcactcgattagaaccgagtatggtcgtaaaatactgagtgacttcggaaatatcaaatctccgttgctttgttgctttccccaccatttcactttgcaacgaaccaaatcactgagtgggcacaaatacaacaacgaatttcgcaatagatcacctactcggtttgagttctattctgaattaattaatcgaggctactgtagcagtactgtacccgggcagcaatggtcgacgaaaaagcctgggtctggcttcacgaatgggccgagtcgacgacgcgagcttggacgaagcaagccaaggcagaggtgaggaggcagagccgatgccagagtatggtaaggttgcggatcgcgaagaaggacgagtcactgcatatgcgccgagagcgagagcgtcatgaagagcaagtcaagagccacttggccgtcctgaaccgctccagtttagatcaagatcaagacatcggcacctcaagcaagcgcgagctccgctgcgcagtccaccgactggtcctcgagagcgacacactgcggaccgagaacgcggaacttcaggagaaacttcagcaacagcaacacttccagtttctggttcacgacattgcggtggacgtcagtgcgagatcagaagatgactggagtctcagcgtccagaatatcgacacggccagcaaggaggtgtgaaggagacgaaggctggaggacggctggagggtggagttccctaacggggagccctccttctacttccatccgtttaccttgtccgagcatcaaggcgcagtggcatcctgtgaatatcaagccgctcaaggctctcagaacatgcctgtgactgggcagttgttcggctggacagtgcaccgcgcccctctttcgcgtacgacaggagacgcctcactccacggccgaatcaggctcactgcacgcgttgcgtgctcgcttgctgtcgcggatgaggtgattgcagggagagacctcaactcctggcccctcgtgttcacgccgcagaactggagccttgctcagcggtccaacgtgagcacacaagttcttcagtcgttcgacagagactcccacgtcatgatgttcagcattcctggcccagtccacactcgctattttctgctcgctcaacgacgagaagaggtggagttcaacggaaagcgctcgttcacgctgatcctcacgatcagcgattcatggcgcaatgccaaaagccgagcagctgaagaatctcagccgtatgtccagtggatccgtgaaggcagcgcgtgggcaaagttctctgaagtggaccaaactatgatcgacgtcacgtgcgatatctgcgcgcagtttgacagcgagctgcatgcgcaacaagttttcactcgctggatcgagttcgtctgcgtctggtctcgggggattatgcagtcgaaattgatggggtcgaggaaatgaaatgggtatctgcgggcgataaggtgctgagcagcatgtactcgaatcgataggagagaggaccgcgacctttgtgcatgcgtagagctcagattggtaggaacctcccgagtcgagtcactacataaagcctcgagtatccacctgcaatttggtccttttggcgagttgtaccaccgctttgacgataagaatttgtcatcctgaccgccatacgtttaggttacggtgttcaacgagatcaacggagatttgagattgtcccgttcaagcaattgagcgttggaaaaactgtacacgaggggatagcgaatacaaagagtaagcggcgtgtgggtgaactgttagcagtgcatgcacagattcacagtacagtaatgcaagtacagggtagcgtttttgagttgattccttcctgtaacttacgtgcacaacccgataggcataattccggcgaggctttgttcctactctctgctggctgggatcgagcaatcgaacaggcgttttatctcaggttgtcaaccttgatcgcgtgaaaaacgttgtcccagctggctgccagtcatccgaggccatgacttcgttcatctggagggggattatgggacgacttttgcgagtgccagattgagctaagtcagcctacgtcacgccgtgtaagcttttgccagtattaataaagaggttgccacaactcttccgacaccgtcacacgcaatacgaggggctcattacatgttggcatcaagtacagtggatttcgtggccgctgccaagttcctggtggacaaaactctcgagggtgaaatcctaaacgacaaggagcagaagcgccgtgagcaccgtatcggcatggtggccttccgccgtaagagggatgttgcggggcagcaagacccgccccgacctcggtattactagcctagtgagccgacgaggcgagcggaacgggtgcgtaacaactaaaaacaatgtaagaaattgtatccgcgacctgcgcggcggatacaatttcttacattgtttttagttgttgggtcgtaaaaacaatagcaacacaattattatggtattgtcccactacaattatatattattggaagttcatgaaaccaatacaatatgatattgccctaataatagcaatacaatatcaaaaactatgaattctgaggttgggcgttcatatatgatgaaaatgctataataaactattataatctctatttttcgggttgaggacacagccttgggttgcgaggttttgtggagcaagcggtgtatactcaatagcgctttaccggacatcaacacttcccaaaaccgccctggaaacagtacagggctattgtaatcgtcatcagcctccacctgtattttctcactgtttaggttggcctgacacctcagtaatagttcgatatcagccatgggacgtttgcgtaaagttcgcttgaagtttgcggtcttcctgtcacattttggcaatgaatagttcatgtcaagaatggtaaaatatacttaaattgttccaattgttattattagttgccctcatattgccgttattactactgcagctttggcctcgcaatacaatttcatactgtattgcccgacccctgccgccgcgtagcggcggcgctcggctagtcctaacttaggactcctaagaagcaataataataataataataataaattcagagagtaccgtcaacggtagactcaccaaaagatgttctctgttatctcacacgaatcatcgggtatgtattccagcaatgctccctgcattcttcgttgatgtgcatcgaagactgccgaagaaatgtttgccagcaggtcccgcatttgcaggcatatatgagggacgcaagtatgcaggatagggaccctacctcaagatgagttgagttgatggttgccgagttattaggcaatcataatacatgtacaagtgcatgggtacctagtagttttgcgctgaactaaaagaagccggcaagatcgcatctctctggccagcgtttactgccgcagtctgtcagcgttccccaagcgcttagggcatgtgccacatgatcattcctcagtctgataaagatggcgctgaaggtgtgagctggcctcgcaatgaagtgccatgctgtaagggctcgatggtgtttgtgtgcagtgcacacaaacaccactgtgcactgcgttgcctgaattggctgcgacggcgcgacaagaagcaggtctcaaccgatcacgtcaaatccttatcatgggatgtaaagttacagtatccttgttacagattaatgacttctcgataagcaaccaaagttctgactatggagctaagaaagacgtaaggtatgggtgacgtccaagcttaaggtgtcggaagcgctgggtggtacttgaagagctccctcggcgtttgtgaagaaagcgcgccttcgtattgacaacaaccggttgcctttattttggttcttacgcagatcaggtccaggatttgaacatgctgattgtgagaccaaatcgaaagacctgagccaaacattcacagcttaggatcatgacatgacttggttcctcagcgcgtgccccgttcggctccctgttctagcaacacttcgttgtgctctctttaggtgaaaaggtgtgcatgaggtatttggcagtgggttgtgttcaaaatcattgcaactactgctacttgtactatcagctactaatcaaacatgcctcccttcccaacttctcttgacagcaagattcattagttgcaatagcacacgctgttcatgcttctatgggtggtgctgaattgtatcccattcgcgactactgcactgtacactgagcactgtaggtgcctttcagtcaaagtcgctgcgcacacctgggctggtttgaaaccagtaatttcctttcacactctcaacatcgatactccacaggtaacttacacacacaactcgttaacttagtttacctactatcacagcatgtatgtggtacatatactttagagttgtgtagtctagctagccacaacttgtggtctcgtggcccacaagacaagcctcactcctgcttggctggaagaaaaaagcgcttcaattcgtagcgaggtaccacagccgcagcacggtaacaacctctccgaagctaagacgctgcactgcgaacaaccctggccgaccagcagcagaagcaggaccagcagcagcgcttgagcgtcttcgagccgggctctccgactgcgcgcacacctcgtcgggctcagcgtggacatcacgcaccgcctgacgcgcgccatgggggtgtcgtgggcatcgatacgcgggtgccaggctcgctcacggtgacggccaaagtgcgcgctgtggcgctcgactcggagcacggcagcggcgagctacgcggactagaacagcaggaacagcagcaatgcacccggataaactccgtggacttgacgtgctccgtactcacagggcatctagagtgccttcgcctgcacgagtgcacgcaccggtcggcgcgtcacctgtagttaccgcgacggacggcgtctgcctcagaaccacgtcactttccgtgtcttcgaccatcaaatagcacagcttacatagcgcagcatgtcgtgctgcacgtggttcaaggcagagttgacccgtcgaagccataagccacttcctggcggtcgatcgcgtactcgtcgttggagacgacatggctcaagacagctgacttcatgctgaagtacacgcccggccgtccgccccacttgcgcttggtagtccgacatgctgatcttgctggcgtccttcaccagcatgctgtagtgcagctgccagcttcagatcggacgcgatgttcttgttcttgaccttgaggctcttccacgcgcttgaccttcaaccgtggtcaccgaggagaacacaatcgcccaaccgcaccgcagccgattgtcgtggacaacgagtcgacaatggtgtcgtgttcgtccatatggaggtacagcttcatcacgtcgccgcagccaggggcgttggaaaatatgattgcgattgtaatattgtcaagattgtcaatcacaataattgattgttgtgtgatctcaatcgacaatcccgttcccatattgtccctttactgattttgagcctttgccagtgatccggtagagcaatatgcaacgccaagcccatggaaccgatcctagactcatcaaagcctttctgtgtcatctgctacttcgaaatgcggaaatgaggggtcattgggtgcccaaacggggtacacgcttaacatgatgaatacaagacccaacattgctttttgccaaggcttttgaaggttaacacgtacgcaatcgaataagcaaagatcttagggcgatagcgccgccaaacgagtaaaaatatgaacctagcagaggaaatacaagcgagaacttagattgcaatcttttgtttttgggattgtcaagattgcaataattgattgtttcagatctgagtcgccaatcaataaacgatctatatttccacagccctgggcgtacacagagcccgtgcccacatccttggcgttcttgtccacggcgctcaccttgcgcgggtcgtcgtaatagtcgaccaggccctcgcagcacacgggcatctgcgagcagtgctggcccagccgagatggcacttgggtagtcttgagagtcgagcggacagcgttgggggtcgtctaccgacggattccgaaagaaaaagtacgcgatcaaatctaagacatgttctgcataacacccatttaagagggactgattaactggctatcagcttttagggaacactgtaccatcggttaaagaggttacttcaacagcctccctacctctttagatcgagttttgcccaactaatattatgtagtttagcaaggcaccagaaatagtgacagatgattcctcagttccaaaaagaccagtgccgtggacgcccgcgtttgctgacggtccttcgtgctcgtagttttgctacgagtgaaggaccgtcacgctgggcacgccagggaaatgctaaagccacgagacaaaagtactagggacccgtgacatcattaccaataagtaccactaatctggtgcatcaaatctgatgcagtcggtagctgcaggtagacatggagtacatcaactactagaggcccgagacagatgcagtactagagccccgagaccgaggacgagtacgtgtagtactagagccccgagaccgacaatgagtacttgtaatactaaaaaacggtacttagatcagtcacatcttgttagtaggaagcctgctccacgtcctgctccacgctcaacgtcctgctccttcttgagatccatctccccctctttctctacagccacctccagctccacatccaggctccatgaacaacttcaactcgaggaccatctccagcgccgggttcaggtggtcacggcgtcaggattcaccgctgatctactatccacttgtgccttgtggagaaaaatggaaactgcattgatctctcgtcttctcggggccaagctaaactggaccccacgtgcatactcactactattggctacaaactagatccttcgatccactgcaccctgggtacatgaacactgggtgtgggtacaacccagatcatttcccccctcgacggcggcgacgacctgcctggcgaatttccgtcgcatcaatagggtcttccggtgccagtatggcccacatacgacgtgccagcgaattagccggggaggatgccacgaattgacgaacaaattgcggaacgtcttcgtaaatcaccgaggccggttcccaagatgcttcttctgggtccaggccgatctattgcacgtgtatctcccactgctgtgcgacttgaccaagtctgcactcaagcaacttatcgacgagatgccctccttcgccatgtagcgcgtgcgcgatcaggtcttccgttactccacgctcagagtcacgataaaattttaatcgagaggcgtgacgagcaacgacattgtaaggtgcgcacaggtcttgcacctcgaatgtgtagtcattgagagatcgcaccacccgcttcgggccacgccaatgcagagcgagtttgttgccacccttgacggctgttgcagccaagacaaaatcaccgatagagaacttcgccattcgaactccaggtttgtttgcactgcggccacgtgcttgagtattcctgcgcggcgaggtcgctgagctttgctgatggatagcatccaacgcggttcgaacttcccgaaggtgctgctgctgctgttcttcgaaccaggaaatagagcaattatcagcaaacgacggcggaaaaatagcatttaactgcgacgaccctggtagccccgtgaaagcggtaattggcgcaattccaccaagtcgatctgaagccataccattaagagctgcttgaacgagcggtaaaatagtgggtcactgcttgatttgcatctttagctcgctgagaagagctttcagactgcgcagcaacagtcggttcacaacctcaactgatccaatcgcccacggcgaatatgcagtgacaaagaggtgttgcgctcccagaatgtggcgcaatctgttgatcacttcccccgtgaaatggggtccttggtcagagatccacatgtgaacaactccaaacctcttgaaccactcgattaacccatgataggcagattctgccgtggctctatcgcactcgatgagctccacgtatccactcatgttgtccttgaggacaagagcatagcacgtggagttctcgctgcgcggtagggaaagaaagtcgaaatgaaggagttcgttgggtttggtggctcgcaacgtttcaccatacggtcgcggtactttcttgcatagccagttgacgcatccgtgccaaatgtgcaaactccgaaggcgcccctcatctcgatagtaagtcaccccagacgttatcttcaccccggatgtgctcgatttcgtactggaaacaagtgagagccattgcccatcgctgcaacttgtctgcctggtagcgctgcatgttgctgtcgaagccgtaagggttgaagatgtacactaagttacggtggtcggtatacagacggaatccgcgcggtctcatcaacaaatactccaacctcttgcacgattccatgagagcgaaagcctctttttcgatagtaggccagcgatgtgacgaaccacgaaaatgcccactgagaaatgctaaaggctgatgacgctgctctgcaagaggcttattcgcatcttctagtggcagttgcgtcaagaccgatccccaatggtcgagactggcgtcggcgaccaacacaacgtcccagtctggcttcgggtgggcgagaggcaccatccccaggagcttactcttgacttgggctagactttcctcttctttttccccccagccgacactagccagcgagattttggctagttttcgtttggttcgagcgccgctgacttgcatagctttctccaggatatcatacaaaggagcagtgacacgagcaaattcaggaatacttgctagcatccaattgactacacaaacaaattgttgcagttcggaagctgtcgaaggtgacaccatatccactagcccttgaactcgttcaggactgtgcgcgactcctgcagcagagatgactttgccacaccatgtgacttccgtcacgaagaactgacacttgacaggattgagctttagcccatacttggcacagcgctgaaaaactgcctccagtaattccatgagttcctcttccgactccgcgtaacgcaggatatcatccagccacactagtaccccatgatacaacaggtcgccaaaaatcaactcgaccacactctgacagtaggcaaccgcgtctttcgcacccattgggacgggagtcggtgtatacatgccacgatgagtcatgaaagtaaaaatctcctgcgagtccgggtgtaatggcaactgccagtaccctcgaaaccaatcgcaaacgaaaaatacctttgcgccagcaacatgcgtgaagacgacatccagttgcggcattggccactgcatgcctatagtcagctcgttgacaggccttgaatcgatacacatcctgaaatcagcgggaggtggcttaggcacaatgcggggtgctgatgcccaacgactattgtagtttctgtacacgagtcccaaatctccgagttcagcgagatgagcgtccatgaacgctcgctccatgggagcataacggcgggcagaacagcgcactggtatagcgtgcggctgcaactgcacacgtaacggaggtacatcaacgggaggagtgagtccaaaaaccacgcaaaactccgctttgtgctgttccagcgatgttttcagcatatccaacgcatgtccttacaagcctctcgaatgagcatcatcaatggcttgtaaaagccgctcacggactaattcagcattcttttctgcatttttcgtctcgggtaagaacgccctcgattcaaaacgctcatccggatcgggtgcagtgctcgtagactcgtcatgccccgcatcttcgaagcaagcaatctcgcgcagctgctgagctctcatcagtggtgactcggagacattgttacccgtaggaagcacatactccagctgcttctcgagtgccgaaaccagtagaccgtccgtagagtaccccaacgccaccatcaccgatcgacctactgtcaacgacatcgtgaggtccgattcgtcaatccagcactctaagttgcgcaacacgagcggcccagctgatgtgtgcagaactaccttatcgaagttatcttgttcgtacaacttcacggtgcccggaccaaaaggttcaaattcctggggcgtctatcgtttaatcagcgggacgtaacagccttgcttgtgtaattcagagacaaatccctgcgaaacagaggaagcatctgcgcctgagtccaaaagtgacaccttcacagtcaaccccagcactgttgcgtccacggttccatgatcaccaacaccctttctctctgcgtgctccgtcgccgcatccgacccatccgtacggtcatccgctgttggcaatcgtttcattgcagccggcggcggctttgactccttcggttcacgttgccgagccgcgtaaaattcaccaaaaaggcgtttggcgtctcccggctgcacctgagggcaatccctcactctgtgctccctagactggcactttagacacggccaacgaaacagcttcttcgacgcttgggtccctgtggcggactctggcttggccgtgagctcctgtcgctgcgggggcgtcttgaacggagcagcagccgcgctgcctggtacagtgtgccctctctgagtttatgcatgatgcagcggcttggtattgctgctttgctgcagcagaggcttctcccataccatgaatgaagccaaacgtgaagtaagccaccgcgaaaactcgatgacattcgatttgtacttcttgttctgctcttggtcaatccgacgctggacctcgctcttgaacgacgctggggcgagagctgcgaccaaatacttgacaatttcttctgttcacgttcaaacatgatgtccaccatattgtggtcctccagtatcttgtacaaattagcttgcagccggttgacacgggactcagcctccgctaacttagtatccattgacaacttctgcatgtcggcgtccaacgcagcataatcttcaaacgctgtctgcttcgactgcagaaaatactccacccactcatcttcggtcacatcttgccagtctttggcgaaggtgaaccgcgcaatgagctctttcgtgccctgctcgatacacgaacccacgggttgggacgaacgggcgattgtgctccgtctggaaagctctcagcgcagcaaagtaggtatgatacgcccgtaaaaagtcgcgacgctcctgcatggagctccccttgtaacgaggcggcttgggcagcgccggagcattcataatcggcccgaaatcaccactcacgtcctccatcgtcacatcgctctttgccggagacgcttgcgggatgctgctctggctaggtcggcggtcaaatgggtttacgataggtgtcgaagagcgacgtgtcctctcggtgcccgttccttccgtcctagctgcagcagctcgacttcctcggagactcaaccgccgaaacgtctcgacgaactggtccccctccgacatggtcccctagtcaattccgataggaactaaagtatactttgatctgtcttcctcgactatccacttgtgccttgtggagaaaaatggaaactgcattgatctctcgtcttctcggggccgagctaaactggaccccacgtgcatactcactactattggctacaaactagatccttcgatccactgcaccctaggtacatgaacactggtgtgggtacaacccagatcaaccgcgatcacaaggatgccagagaccttcacgtgaaaaaacataggatgataataggaaatgatgtctccagcccgtagttgctgctccccattctccttgatcaacgcagcaacactgggaaggcggtggtgggcctccattcacagcccagagacagccacatcacagtcgcggttgagtagtagcttcgcgaagaagaggctggcagaaaagtaggtaaagtgaggaggaggaggagttacggtcggcggccaagcgtaattggtaagtggctgctcggaatgattagatgtagagacgttggtgactagtactgcaacactagcactgcatctactcggtgtctgtctcggatctctagcactgcatgtactcggtgtctgtctcgggcctctagtagttgatgtactccatgtctacctgcagctaccgactgcatcagatttgatgcaccagattagtggtacttattggtaatgtcacgggtccctagtacttttgtctcgtggctttagcatttcccggcacgtcatggcccgcgtcttggagttaggcatgaggagggcgccgcccttgggttcgcgccagtgggctggcgccagcaaggtcactcaagaagcgggcgaacatgtcgcgaccgaggtatgaagcatgaagatgcccagcgggctgcggcagtgagcacagcgctcttgaaggccttgagaagcagtgaaggcatggctgcgggggccagggcgagtagggccgcggaggccagcgcagtggtggcgcggcaagacgtgtggtgtgatgtcactaaagtaaatttgtaaatagtgacacccgagaagctgctgttaccgaataatgctgttgcagactagccagttgctaatacacatgtaccgactgtcgatacatacatagacctcttgcctcaagacgccgatagtagctcgagtgtacgcggccgtggatgtacgcgtctcggagatgtctgctcttagcttagtgcctcccacatcgaggaacgcatcctacagtactgctcgatgatcatgagcaacaggatattcatgctatgacggagttatgtcgtcgtcgtaaggtatacaaatgttcatgggtagttcatcatgattaagcttagcggtttgcgctggtgcgatgattattacattggcttggccagtcaggacccctgatcaaaggaaaattctgtgcaccaggccagtatagattacgtgcagtcaccgcagatttggccttgcgtgtttaatagaggctagtcaggaaaccttgcaaggaaggagaaaacctgttcaccgttggtaagtgtgctgcagaatatcacgttgcaatgagtggctattcaggaaacctaatgaggataaaacctgttcaccttaaaattgttggcagtattagcgttgcattcttttgatttagcagataacgttactgtttgtttgcagtagtttagctttgcttttggtgatgcagttggaattcattgcagtatcatgactactcaggaaaacctaaactaggaaaaacctgtttcgccgttcaaggacatcgtactcataagataaccatgaaggttgaggaggttgtcgtctcacccgcatattatggttgaaaaaggggctatggcttcccatattcacagattaatctatagtgtgggcttgtccactctagtgacattcgcctttcgacgtgttaatgtcgctttacttctccacttggctaccacacactgttcttgctttctaatgggtttacatccatgtcgcatcagacagaagcttacattgcagatcgaaacgttgcatgtagtagttcaataatacgcagtcgtagttgtggtaatagagagtgcactcgttcattgtcttacagatagattgtgtgcagtggcaagctggtttcaaacatcaacaatgtctaccggtagtctgggatagacagaggctgtataagcttgtcgtatttattcacggaaatatacttggcagaggcttagtatgagtgccgttttaatgttcatcaaggacagaagtcttttacacttgtcattaatctcatgatgtcgtatgagtgatcgaaagaagcgtagtgttcgtgcttgttatagatttttgacagcggtcattttcgagcgtcaagatgtacgatgttttttttattggaaaaggttattgagttacttgcatgagctgaactctaatatccttgttgcagcgtaagtgatgagatcaccattctgcggtgtgttctgtaccctcgacgaattatccagtggcttgtgttgagagccgtacattctctctctctttccaatgctccacatcgtttctgaggtactccattgtgccatgaaaatgtcgttgtaggtgctctcgactgggttgcgagatcattttgctcttcctcgtgtccattgctaggttggcgagagagtccgccattttgttgtgtgcccggtagtggtgagtccacgattcaaccctgactctgtcggccaaccttcgacattgcgtgtattttccgcgcaaaccttgtgcttttggctctctccgttcttccatcatgcgtaggatcaacttactatcccttactacgtgaagtccgtatagttgctgagaggccgcataatgtagcagttggtggagaccgttcagttccgcccgattgttagtagtgctggtccggccaagcgaaacacagctgatccatacgattgtaggctcgggatttccgggcgagaactccaccagcacgctgccactgccccctggtccaggatttcctcttgatcctccatcaaagaagcccagaaccgtcgtacgagatggaagcatcgcttcctgcgtagatacgttactttcagtcagcaactgatacgcaatttctgctgcacagcgttcttggaaactctgcggcgttactggtattctgctacggagccgactgtatgcctcctttagtctttggctgaggcctatactccatgctgcgattgacgtcaccgtagatgctgaagggtgagtcattcctgttcttctccgccatattatgtgtgctgtcgtggccacccccagtctccacatgcgttgtacaatcgtgtacaggtgatccagtgctccctccgtgacttgcgaagaattatcgctggcggcgtccacgcacttctccaacatcagtgtgggtacctgaatcagctgcatgctgaagattttttttatgttagtcctaacggaaacttgctttcgccctgctgtctcccattgcttcaagaacacttgccataggtgctgcgctgtagggcagttccaaaccaggtgcgagagggttagttgatccatgggatcacagcattcctccatacacctcttgtcccgtagtcttctagtcttgattctatacatggtctggagttgaagatgtacgatgttaatagtaagacttatacacatttagtgcgtgttgctttggccaaatgcggtatattcatgcatgtatttgtcggatgcgtacttctcgtgcattccttactacttatataacagtagatataagcgaaagtcgtgcttgcagtttcgttaacgaggcgtttgtactttacgtgccaagtatgacatgagcgatagaattcatgctcttaaactcattcgttaatcgacgattcgccttgccatagtgataagcagaagtaacgttgccatttcagacaaaggcgtagttcggccttgtcaaattacgctatccgacagaggcagatttcaggcttgtcatgttgaagaaacaaagcgtaactctcatcaatgagtttgactgatgtggtattcgtgcatatcttgtcatgtttaccggtagatgcgaacttgttgtgcatgcctggagattaaagacataagcgtattcgtgcttgtctaatgggcgagcaacgggacttttgtcaagacaaccctcttagaataaaccagagtcatcgttcttcatgcatatcgcatggtgttcaatttgggaataccgatcggtaagccatttgagtggcatgttttgccgatgcgtggttagatgacatgaaggcccgtctagtatagcattagcgcgccgatggctttacggctgaggcgtttgccagaagcaacttcacattcgcatgtggggcaatattcagggcttattccttcctgttttcgtgggcattgagcaagttcggcgagtcagcattgctgctctcataagctatctcgctggtattggggattagcctcccagcttggcaagtggctagctcatgacattgcgtttcacgcagttaaatagctctgggattgacatccaggcattacggtctcccatttctcggatgtgcatttgcacgtgtcatcgagtggtcgtctggcacggggatttcatccggccggcgcgtcggcaggacatcgacatcggccatggaatatgtttgcgcagattaatcgtccggctggttcgtgtgtcgcttgtcgtgccttgcttcatgtcggcgcttgtcgcgggatgcgctgagttgggcagcagtctggttgggccgtctccttgttgatcgcgtccacatgcaacaccagaatcttcatcacagtcggtgagcggagcggctgcacgaattggcatcgccactacaccgtggttgaggtgcttgtcatcgagtgccgtgcacttgcgggtcttcctcacaggaactggtatggcgcgggatgttgtcgcttgaggcttagcttgagctcataacctatgaaggtaagggtaggatcgtaggaacgtaaagaagaagaagtaggtgaggtggagccgccaaaaggcgaagtaaagtttattagttgagagagctcctgccagaaagcaggagatggctggtgcggagcatattacaatgggagactgtatagcatactaaataccacaataacagctttaagagggactgagtaactagctatcagcttttagggaacactgtaccatcggttaaagaggttacttcaacagtcctgggcacgctgcgcgcacagctcgtaaaccgcaggcgggtacatacagcgctgccttcggcagcgaaagcaattgatacagcaataaactataaccctgcacgcactccgcgctaaccccaaaaaaaaccttgctggtaaggcatgaaccctacaagctgtttctcagccacagcgcaactatgccacgcacccggtggcgttggtggctccctaagcgggccgcacacttagcctcaatcagctctctagaagtcttccatgtgtagcaaaggcgcttcttagagagcgctctaggtctggatagaagcgggtaatcgtctcctccgtggtatgacagtcgaaagtacctgagaacgcgccgcttgaagcagtaagatactgccactcgtttgtagaccttgggtttcgagccattgccagtggccctctttcttcctgtgcgtggcatggcggtagggcaggctttctagctgggttttgctgatcgaagtgatggcttggcgcgaaatgcaattgtgagggcgagttagcgcgaattcccttagaaatgactggttattctatgagctataacatgaaattaaaggtaaagattggctttttatttataacgctactgaattttgattaggcagtcggtggtgtgaactatgatatatctacgaattatgagttctgttgtgcggtattgatgggggactgtatttgaaggtactgtattcttatacattaccccccccccccgatagggtccttgtattcgcagggaactctaattccttaccggacactatcccttccggacataatatgaaacacttctggggggtcttgccaaaatgaccttgaaaccaaatcgaaatgttttcgcggctgctagggcacatcagggctagaggagatggcgttgattttatccgtggcaaccgcgaggccgcataccaaaaactggatgcattaacgctacggacaggggacccatagtgatcatgatactgttagaaaaggcaaccaggacataatgtgaaacaaggaaaaacgatatatttggtttaccggacgtctatagaccatcagacgatgtactagtagttagaagcagcctaccgaagtatataaaagcattggaggccacatgcatatgctcaagggtcacttagctgtctaatatggtagaattagctcccatccaaccgaggtcgttgccggctcgttacttgcccactatggcttcgcactctctctatcgatcatactagcctttgttagagccgtaacatccatctagagtagataaagtccgtagcgatgttcgcttggcacctttaatcatcacttgcccacaccctgttgcaggtcccatacaaggttgagcccatggtctctactaagtacgaatttacattaactgctccgttttgaacacaagaggtagcaatcgaaagcttagaatgtggagaatacacctggttagctcattctgcataaaactgcactgaattgacattatgtgggtacttgtgttttcaccttatgttttgctaatacaaatcccaagtaataagtgcttcagaatagtggactgtttcatgttttgtccggaggggatacaagtattcggtattctacgttaataggtatttgcttctacggtataatattcggtattctacgttaatacttacgttttgacaaatcggggtaacctacttggccattttaattcctccgcggctatatcgacttggtctccataaaacgatcgcctaatcatgcacatccactcacatatgaaacgaatggcgggaccccggggtcctcgtacttcgtgatgcgtttattttggatcatagtcggtagtgtacgcaccacctgcccgtcaaaagcatgcaaaaatgcagttctaagcttcaattgactataatagagcgctcaaaagcacatggtgtctgtattttctgttatcaccacatcactaagtacgagcgtaatgggggaccgtcccgccattcgtttcatatgtatcgcaaggacgcgatcgatttacaaatcgatcgagctaaatcagggtaataatcaatcgattgacgagcaaaataggcaaatgaagcggtttaagtgaaaaccgtgaaaacttttcacaatacatcattgtataataaaacagtaaaaacaaaacggatagactaaagtttgagcagccttgctggggatacgatctgttccagcttctctacaaagcgaacccactcgatatagagctctcggccatgcgcttcactcaagcaagtgccccattggttatatgccacatccaccgtcgattcatctacttccgtgagcaccgtcgtggcccctccttccaaaatccactgcacgtcttgccgcgctccctccgccaaccggttccaagcgttagcttcggaatcggcgatcaacatgatgtatttgtccctccgtagcccatttggctgcgttgaacgtgtgcggcgcgccagtgcaacataccgaagacgaacttctcctggaatgctgtataccacaacgtaggcatgcttgccgaacctttgcaacccttggcatgccattcgtccgctttgagctcggccccagcacctcggcgtcgtcagcacaggaagcaggctggggtccacacttgtcagtagctgctccgagtcgtctaacgaccagcgcagacgtctcgtgaagcgcccatgggttctgaaaaatgtgttggtctcgtccaacgccgctggggcatgctccaccgcccagcccagaatatttctgacttgttcagtgcatgggtgttgtagcgagttgagtttaatgtcgttgaattcttgtgctgagtaagggtggaaatggagcgaaggcgacccgtccaagaggtttacgttccagcccagctcgcccgagcctttcaaaatggatcgaggtgatggatcatcgaataaccgatagccatacaggtgacgctgctggcggattgcgtcttcaaagccgtcgtacggctccagcgccttcagtagtaaggcattttcccgtgccaacgctgcacagtggatcgtgagctggaggagagctacgaactgctcgctgtagttcgcagaagaagtatcggatacccttgctgctttgacgcaatgctgcagcttcgtctcctggcactcccgttttagtctcgccaagtcttgtttcatctcggtgcgccaccgtgccactcacgctcgatggtagttgtccgctggtcgggtcgggatcggaagttggcgacacgatcgctgacgtcttggtaccgcacacttcgtgtgtattgttgcatgaagaggttggatcgtggtggaaagcatggaattcgctgctgctgacacgcctcgatacgagtgaactgcgccagtggagcagcacgtatatatattgatagcttgtgctcttcaaagtaaggagacaaacagcctgagagctctgaaatttaaagtttaaaaaaaaagaaattggtgaatggtaaggaggaagtactactgcgtgggttgaccaactcagaaaacctgcacagagctcaaatggccaatgtcgctatggatagtggttgttctcgtagctgatgtatttctttatggctgtatttgcccgcacagtcgagttgactttcaatggcgtactgctctccttgtccacttggataggcctgcctaaatcgtgttggacatcaatttcgaagatcacaacttttaaaaattaatgcggacagagccacactctaaaacaacaattatttgtaaagattcagggttttactcaactcagctcaaagaagtctagcgggtgatatcgattgctccaagcgcacagcgaaccggatccaatcgatgaacaattccctgccatgcgtctcgctcaagcactcagcccactggtcgtacacgacgtcgatggttgattcatccacctccgtaattgtcacgtagacgccgccctccatgatccactgcacgctttcctgcgcatcttcagccgctcggttgcgtgtgttggcggtcgaatcagctatcgtcatgatgtacttgtccacgcgcttgccatccgatctccgctctctcgagtgctgagcgagagcgaggtagcggaggttcacctcacctgggatgttgcacactataacgagggcgtcctggtggaagttctgcagcacttggacgctcgtttccccggtctgaacgcgtccccaacttcgaggcgctaccagaacgggccacagtttcttctccatccgcggcaggatcatttcagacacgtcgagcgagcagtggaggcgtcttgtgaacgtagcgtgcgccacaaacgatgttcctgcttcgttacgagtgagcgggacgtagtccaccgtccagcccagaatctttcccacagtcgcagtgcacggatggcgctctccatacgcgatgtcactgtggcacaggataccgtcgaattcggccttggagaacgggctgaagtggaatgacggctcgttgttcgggaagcttactcgccacccgtcctcgtcgccatggcgtggcgtctcctcggcatcttgacttgaattttgggagctaaaggccccaaactcctgcccctcaagacgcagcaccctctcgaacttgctttgcagcgcgatcgcctccttcagcgccaggttttctcgctgtaacgctgcgcactcgatggtgacctgccggaacgcgtcgccaagtgactgctctggattgaggtcggacctcatgcgcgcttcgagcacccggtgttccagctccttctccagacgcagtcgttcttgctgcatactggcgcctcgctccttcttctgcttccgccacttgatcatccgcgcccgctgctgctcacgtcgccactgctcgcgcatggcggactcccagagtttggtcatggcggggtctcccatcgtctcgtcgatggtcatgttgcagttggtgctgctcagcccaggcagtggactggagaaggacttgacagtgtcgaccatgggtctgcgttatagcaaataactcggaatgacgtaatcctagaccacccaccgccccacggagaggaaggggtctcgagcggaagaggttgtggcgttgtaagccaagcccatcctttttctggtatcacgtggtctcgtgcatcaggtgaggtgagctgcgcagaacttcagtactgtcgcagcgcaggccttcaactaatcacagacagcataaggacacaacgaaaagaaagatgttgtctaagacgagaacctaaaacgcactgcacttgtggtttttgctgctggggctgcagcagagtttacggtcgcaattgagattttgcggctggatccaccagacagcggtacgaattgttgtccacaagctgcggttccctcaccggacttcctatcttacaggtgatcatcaggtgccgcatatgattccggcttcaagtccgttcgagatccgttgattctgtctctctcttcgctgtaccggaactgtatgtgaagcagacgagccacagagctcaactttccatacccaaaaaacctccgaccctccgactttctccgactcgtacacaaaacatgcggataggagggtggtcacctttaactatcacccagctacgcgctacgcgcaaacctaaaacccctaaaggctcgctgcactcgctgggccagaaccctaagcccgctgcggctcgcacgcgtcgcctccgcttgctaggtagagcactgctgggtcgtgggtttgcagccacacggactgtcaaaccgcaggcgggggctcgctacgctcgctccgtgccatccattccaaggctccgaccaatgagcaaacaggacgactaatctatcttggactgtgtatgcataacacttcgggaaggggtagggtaatactgttatgctccgaccgcgcttgactggggatttgtatacctaacatcttaagtgcggtcggagatttgatgatattctaccataacgcagattttgatgactatcatgacaatatgatcattccgtcattatggttcacttcagtatggtgccttattgtatcgtggggtcgggagggagggggatcggagtgaaattggtttttgcagtacgataagggcatacttgcacagtgcatacacgtaactggacttcctactaacagatcggctagactcgttacgtcttcaaaatattcttgcaatgcttttgcggtcggcttctacatgtagttgcaaggaacaagcactacagtaatctgcccgagtaaggaacgcctgatatatataaagacgcagaatatataaattgatgttaagttgagtatacttttccaatgtactgatttagttatttcaaaatgaactgaagagcagctttacctacgagtccggaatgattccaacagtggcgtatggtcgaagcactaacctttgaccaggcatcctcgcaccacaacagcgctgtcaactggtcgacctcgtagggattatccagcccttcaccttgtcgagaatgcccactttctcagaccaagtgagacggagacgcttggacggtgtggacttcatgggtgtggagtgggggaggaggtgggcttgtggggcgaggtgcaaaagcaaaagtgcgagtctaccactacggtacatgtagtttgaagtctagtaagatcgctaaatgcgtgccatttttcaaacgagggtggagagctgatgattggcactggatttttcaccttagtacctcagtaccttgcagtaccttgcacatccccctatcgccacatcgactggaaaataatattaaatatgtgaggctattagttgtacacccattccttattcgggcagaattctgtacagtattagtggtagtagtgcagtagcaagctacctggtaggacaaatcatgataaccgttcatcgaattggcaatacattacggcaccgtagatcttcgcctgctgaaccttccagtgcagtacgtataacggtaagatagttgacgccgatgggaaaactggaactccagctttgacgttcttgctgttcgctcagacaagtccgcattcctcaatttgctctgcaccactcaagccctttcaagtcctcagtggtctgccacccaagtcgaaacatgcgcgtgtgctccgtcctcctagttgctgcagctgctctcatcgcgaccagtaatgctgttgagccttccgccacgtcaaccgttgaggttgctgaggttcaagcgcgtggtgcagacaaacggttccttcgtagcctccagactgaggaagagcaaggagacagcgatgtcaacgaggcagaagacggtagtgaagagagaggactattcgcctggatcaaaaacgcagtgactggcgatgttcttctggcgaaggcgaataaaggcgacttcgagatgcagaccaagctcttcaaaaagtggatagaagaaaaacctaaagtccgacaaaacgcgatcgccaagatcatgagggatggaggacgcaagaaatacgatacggtgttgacggcgtggaagtaccacgataaaagaaccgccaatggtatcggcatccgtggcgctaccgatgatgttgatgaactgcttccaggaactctcatctacagggcagctgccggaaatcagggcgcccagagcgcactattcagcatgtggatcggcgctgaaaagaaaactttggacactgcgcgcatactcctctccaaatctgaattgccggccaaagagtataagagactaaacaaagcgtgggtgcaataccgaaggaaacacaagtaagctcgcaagggtcgtcgcaggcagaactgcggcctcgtctgacccgaagaggtcagattcagggcttgaaatcaacatagcagaaagcttcacctgcaaaagctggtattttatttttattaatcaatgactaataataaagaacaccactttttgctgattaaaaattaccccagtatattaaaaacagtagtacagtaatgtgcgtcaataaggaaccgctaatatggatagaagcaaggaggctattgggccaagcagtgtaacatagacggttctgggtactgtcttagtgcattaaattggaagtatctggtatatttcccggtcaatttctttgaatgattcatctaaatcagtactatcagcgggaaactgggctccttccagccagctgtttgttatatgtacaaggaaattagctcctacacgttccttattgacacacattactgtaaaaggaaccaaagcatatcttgagccaggacatcgacttcagtacgggtgaacagtgttcttatgaaaacttccgtgcaaacttgagaatggagagcctttcgttcttggctttggtagagcgaacgacctggtcagacacaaaacaacggcaatcgaaatttagagcagttgcgtcgtacgagaggaaagcacattggaatgatagcgcaccgtcatctcgaaaccgtccttggctagtatagcagcgatttcattgggtttgttctcgaccacgacgaccatgtagaagaccccacgaggcgacagcaaagcgctaatcttcggcagcaggcgatcaatcacttcacgtccgtgtagaccgccagcccacgctgcctcaatacccctgcagtcattttcaaggttattctctagcacagcatcccagtcaacactatacataagcacacacgtacgtggatccgacctcctccgatggagtcggcacatacggtggattgaacagcagcacatcaacttgtccctacagctccaaaccctcagtgagtgacaaccaataacacgccatttgcatggatcaaatgggcttcgcacctgtatccgtggctcgtaacactgcagcaagtcggtgcgcacgatgtcgaacgcttccgccccgttgttcttggcggtttgttgagcgacccccgccgcgagcggattgatgtccgtggccaggaacatcgctctcgtccccaacttctgcaattgcgtcgccaagtacacgaacacggcgccgcttccacacctgcaaccagtctcagttcaatgcattccagtctgtgccagccaacggattgactcacgcacccgatctccacgcagatcgcggggtccagcgccaccagcttgggcagttcgtcttgcagcgcgtccaggaacaggaacgtgtcctccgccggctcgtagacgtcgcagtcgtacgccatgtcgatctccggtagctccgccatggtctctcggctttcaaagcactgccagttatccccacaggttcgggcgtgtgcaccacatgagactacacagtgatcatgaagggacgcacaggtcggttgccaatattactacggcgatggacttgaccgaggatgaagatggctacaatagcagcaccggcagcgtggacgaagacgccgagctggaactgtcctgcgctctgcatgacttggctctgagggtgaaaaccttcgaggccaacatgcagggccggttccgccaggacctgggcgacgaggaggacgaggaggagatcacggaggacctcgaccattttgaagaggagggagggcccagctactacggacgacatcggatggactcggactcggcgtcgcccaagcgtcgagtgagtagaaggaggaggtcgagtagtggcttcaagacggtcaagcaccagcacggcgatgaagaggacggcgactatgaggacctcgacagcgaccaagaggaccgaccggaggccaagagtgggcgtgacgactcggaactgagtgagggtgaggatgaatgggactcccaggaggagaaagaggagctgtgcgagctcaaacagaacatcgcaaagctgcttcaaagcatgcaggaggaggccaaagccctcgaggacaaccaggcggactgcaaagtcgtagaatagccacgcatatcgtgaagcctgaggtttgataacatgaatgaagcacttcaccctgaaaacaaaaaaaatcgcctgcagcctgtcgctattcagtacacaaagccatcaggcccaggatcttcttacacggttgccaagactttcacaacttgtggcatttgccacctcattgctcactcccgtcaggcccgctatgtccaccgccctatttcgactgtaaatactccaagaaccgcttctgcagctcgaactcctgttcgcgcagctccgtctccttctgacgctggtccatatcgaactgaatcttgctctcgataagctccaggatccgtgcgcggaagttatcgctactgatagtgtccgacgcggccggcattttcccggccatggcgcccacaggtgactccatctttctccgcttttgcggcagcatggaagggggcacagccggaagagagctgccaaacgttgcgccgtcagtcttcacaatgaccctctccttgccgttgccgtccaccaccgtctgccctgccatcttgtggttcttccggatgagcgtctcgttgatctcgcgcagaatcgtctccttgcgcgcgttctcctccatcgttccgtgcttaaataacttgtcgtgcttgccgtctgtgtacattttcatcagtgccgtcactcggtcactacgcaacaataaaaaatagagtgagaccatgaaaataataaaaaactctcgcatctcctcaactattttcctcaccgacacgtgtgccatgagtacgccgccgggttcttgtacagggatatgcccacggactcggccacattctgccacatctgcagcctcgtgccgtgcttggccgtgaacgggttgttgacctgcagcgcctccagcagcgtcacgtccatcgtgccgttgaacttggcgtaccggccgcgcaccgtgggcttctggggcgcggcagcctgcgctcgccctgcagatataagaaaccattatagcatgtcaggggttcacgctatcacgaccgctctgtaactagaacaagcgctgactagtgaatggcagagcagcacgtagctacctgcatcgacacatgcactgcacgcaaagctcacgcagcctacctagctcattgccccgatctactggtaaggtatacaaggtcgtaccggtgctggccggtgcgatcccttcgtcccccatgacgtctcgagacgctgtaaagttaccgaccgctgtttcttcgttcgggccccgaatttctcaaaaatggggaggaaaaatcgagagccagcggttttgagaggttcgacgaccagttttgagagggcctgagcgtgacttgaacaaagtatgaagttgaagtgcgagcttgactgtcaaacttcttagcgatgaaggttatcatttaacgttagcgtcagcgttagcgccaacgagtagcttgaggaccttgctaatacggccttcacttggtctcctcgtcgggggcctcgagcgacttggcggccatctcgagcgcgccttcgtacgtgcggttgccgccgatgaagccggcgctgtgcacaaacgtgcagccctcgatgccggacacagtggacagctccgcgtcgcgcaggccgcgccaagcgggcagcaggcccttgcgcagcgcgaaggatcccggctccgtgttgagcgcctgcacgcgcgtcatgctgcccgtggcgtcgttgtacagcacgaacttgatctggccggagatcatgagcttctcctccaggtcgtgcaggtgcgacttccacgggcagtactcggggaagtgcacgatctcgccggacttgtgcgtctggaagcgcttggacacggccttctccacgatctcacgcgcgggcagccacgagtgcacgaggtcgtggatggcgtccgtgaactccgtgatggtcatgtacatggcctgctggaactgcgcgttgacgcgcgcctcgctctgatcctcgttccagcgcgggttcaggtagcccacgcggttgctgaggctcgaggacacctggtagttgtacgtgatcttggcgtccccggcggcgctggccacctcgacgccgttgtcgatgccgtcgatgtgctcgacgaagttcttgtacgccttctggtgcaaaatgtccagcgtggcgtcgtccagcgtgacgggcgcggccagcacctggatgatctcgcggccgaagtgattgtacacgaggccggcgctcgacagcttggtgtcgcgctggtcgaaggtgcccgcgaaggagcgctggtggtggtcgaagcgcagcgcctgcgcgtcgtacacgccgcccacgtccacgacagcctcgcactgggccagcttggcctcgtcgcgcgtgcgcagcacgtcgtgggccgcgaacttgggcagcagcttcagcatcgacacggccagcgcctcgtcgcagtggaacgtaccgttgtgggtgccgatgtacttcttggcggcgccctcggccagctgggacgtcacctgcgcgctgcggaaggcggcgaagcacggggaggaggccacgaaggcggcggcttttgtcgggacggccatggttgatacaccggttggatggcaccactggaatggaaagtgacttgcgttgactagggcgatttgaagggactattctggagcacaactatttggtacaggtcaaaccgaggactagattacacttgctgtgagtatgacccaagttgaagtggaccaaactaagacgtcgaggttggttcacagcagatttcgtgaatttatgttctctatccgttggacgaatgctacaacgttgtgtgcacgctatggcagtatctcgctctattatctatatctagtgaaaccaaaatctatgaacgtgtcgtgagaggactaaaccgtaggcgcagcctcagcttgctcctgccgaataggacctgtcttgatgaacttggcacaaaagaagcccatggtatcgagctccgtattggcagggtcgaagcgctgcacgagagacgcctcgtggtcgttgagaccttggccagccaacccgcggtcgccgatgtggacctcgccttgcgaaacaagtttaagcggatagttttgcagtgcgtggtgcaccatctgctcgttctccttcgggttgatcgtgcacgtggagtacacgagggtgccgccaggcttcagcagaaatgccgcaacccacaggaagttgcgctgcatgttggtgtactcagccaagttatcagcatctcccgcgtggagcaaccgagggcgcaagcctagcgccgagcaaggagggtccagcagaatgcggtcgaaggtttcggggaagaacccttctacctggagcagacgtgcctggctgggagtgtccgcctttgcccgagctagaacctgcgccacacaggtaaagtcgctgtttccctgtgcggcagccaatcccgcgtccaccttatccttgggtaggacagcatgggtcgagtccatcttgaggggcacgacacactcgagctgcagatcgtcgcaaagggtccgcagctccaatgccttcctcttcgagcggtcacacgccaccagcgtgcccttgttccgcatcagcgtggccacatgagacgtcttgcctccgggggccgcacacatgtccagaatcgcatcaccctcctgcggatccagagcgtgggccaccaccgagcacggaaggttctggacgtagatctgaccgtgcagcacgccgttcatcggtggagcatcatgacagacccgaaccaactgagtcaccgccagtcccctcacagcccggaaaatctcggtgcgcgccatcttggtcacgccgcgagcaatcagcagcttgcgtccatcgtgagcggcaaagtcgctgccccgcgtgtggttgtggtccagatcaacgaacacattgacctcgtcctcggcgttgatgccgctgctggcgctcatgactccacgcgcgaagatgtcgctgccacgcagcaccgcctcgccgcagagtcggtccaccacgatactcttgagttctgggttgaaatcgaccgcagtatcgccgctagccgccgacgggatcatcagcacgtccggcagcgaggcgtgggcgaaggcctcgatgggctggcgactggcgtccagcgctgccaattgggcgttgaacccatccagatgcggcttcagggcctgcagagcctcgtcccgggaaagcttgagggtgttcactcggacggcggtgaaggcgggcctggggttgttcaaacaagcacggagttagttatttcggctttatgacacgctttttccggctatgtgggacttggggacgtacggtcgggcgagcgcgtgcttgatgttggtccaatggggttcgctgtaggcggcgccgagctcctgctccacttggtcggggaacgtcacggagaacgcgtccagcgtggtggcgcccgggacggcggtcgagtcttccagcggagccatgctgcggggattgtaatgactggtggagtctatgcaattcaaaatagtgcgtcgtgattggctgaaatgtggagctacggtacgagaaggtgagtgacggtcacgttgaagttgatcagagtgatggtcaaatcgtagccgcagatacaccttcaacctcatttgcgaatctaccagcaacagcaactacagtacacaccagccatggcctcacgcgcccgtacgtcctccttctcgacacagcgcattgctgcgtcgtacgctgggcgtggcaaacgcgccaaggctatcgcaaccgccgccccaagcaagaggcaaatggccatcatcaactgggagaacgtcctcgcgccgatggactggttggcggtctacctgggcttgggagcgacaaacgaagccatcgagagggcggttgcgcggtacaggagctcgccggatctgcttcagtccctggcggcgatcgaagagcgcgtcatggagcttctgacggagaccatgaagctcattgacgggccagtgttcgttgtgagcgagtacagcaccgcctacgtggagctggtgagcagtttgttcttcccgcggctgacggcggcactgaggaacgctaagagcggaatttacgtcgtcggcacccccaacacgcagctgacagctctggagatgaagcagtggaaggtcaatttgctgcacacggcgatccacgagcacctatttgctgggatcgatgaagtcgtcacaacgaatctgcttgcgcggtcggcgtacggtaggatcaaagtcgtggctctatgcgccaacgaagcggacgccgctgcagcgtccgggatccatttgatcgcgccaaatgcggtcatcaagcatgtgagggttcaaggtccgaaggctggatatacacattcgcctcaaccgtagacgacttttacgctcagctacaaagcttgatgcagtttgtcagacagaacgcgaactaacctgattacataagatcgaagcggctagcttctccgacttttaaagcaacatgtatgcctacatacttactttacaattcgcttgacaaatacatgtcctaactagccccggacttggtgaacaccccacgatcccttgcataaagtgcccccctctcttcctcccccaaatacaccttgttcacagacgtctcttatgctgacgctcggccaaagcacgagatcatctaaccagggacaaatatattttgtgatgatgatgaggtatattggattaattaaaataatcctaacaaccgtgcatcacgccaattggcaagacacacagacgcagtgctccagagagcagatattccgcaacactttaccaccaggttagagaacgaaatgaagatcagtagtagcgaaaaggggttccgggatcattattcgattcggaacagttccacgtctctatagtttctagttaatctttattacccagcctcaaagcccaccggtgggctcggtccaaatcccacgcgtgggctcaaaaacaatagttgtagataagacgttttcgctttccaaagcaatgtaattgattctaaagagctccaaatggcacaatgaagtacaagtgactagccactgacccccagaagcaacagcaattatttatcagaccatagttagtgcggaaagtcgtttggtagtctccatgcagcctatctacctctataatgatagcggcaatggcccaagctctacagacacattgaaaacagcacagcaagctaaatgaattcacgtgatgcatgcactgttgggacataactggttagccttcaactgccataaggcgtcaccttgttgtacccatgacgaaattgtaggggttccgactctgggagtaaatcagtgacccagtaacgctctatcgagttggtagtgcttacaatagagtctacacagtatttgaagtgtttatctggtcggctcttgctaagtttcaccgcctaccaccattggaacggctaagaaacaaaatgtcgaacagctataataggtattttttggcccaatcttagccgctgttgctactaacggaaattaccgaataataccccgggcactatttattagtaccctcccattttcaaaacaaatatgctaaattatggatattacacagtataaacatgatttcgacaatttatactgtgtaatatccataatttagcatatttgttttgtatctttgtatgtaaataacattgtaaccctgggatacacattgggttacgttttagagggtactctacgggtaaggggtattattcgggaatttacgttactgcagtacaccgttcaccctaattagtcgtgtgacttaaatagtcatgcatcgtacttatacgaaattttacggtatgtacatctaaattagtcgtgcacctgaattaggcatgtaccaaaacaatctataggagaacactggttaagcttgacagccaaccactccaccgccggctacaccgtgctgttctaagaccacagcactcccattctccaattacaatggccgacgacgcagcacgaagcctgcagcaggtcgtgcctctatgcgaccgggttcggtgcaccgactggatggagctggaccaagcccttcgcggctcgtaaggtctctacgggcgaacagtggacttctccttggccctcttccgctcctccgaccggcgtgtgaacatgaacaaggcccgtgactggtggaagaagcgagaagagacagcggccagcctcgaagacccagcgcagctcaagtttgcgaccagccgacagcgcatccgccaccagttcgttgtggagacgctgtggtggagtggatccgctgggattagcagggatcccacactcacacactgcgcccagacaccgactaacggagggggtactccgataaccgtaggttgctgagtggctcaccttgtgtacccgtcggcgggcgggatctgctctctcgttgacacgagatgcgcagcgggtgaacttgaatgtccttggcggggacttggggagatgttggggtagatccgctgtggaggttccttcacgcgggtctgggtaggttgatccttggtcttggccgtagatcttgtggatccgataagtaatataccggatccggagttgttgctgtaatgggcctactttggctcactactttagcatacacgtgtgcgcacgtgtacgaggaagcgtagcttagtttaaactagagttaattatactcggaccgccgagtatagattaatctaaataaacgatccaaataatgttgttgggctaaaatgagaactgctatttttgttttatgtttctgacttcctctaaatgtaatattctaaactgggaatctgccaacggctggttggcagaataccaatgctatgcatgtcgctcattggctaaaagatgctgttttcagccaataggaatcctaagtctctatggaccacccgtcgtggtgatcgtaaatgtacgtatcctttggtgtgtctacaccatgtacgagaaagtctttcaaacctctaacagacgtctatctgttagagttacaagtgactgtagccacttgtgcgtgtaaccctgttacaccatcccccctcaaggttagacgcgccgagtcacggcacgtcaatcaggaaattgaccattcgtcaattcttcacgttgagagaaaaaaactcgagctcattccgcaatgagctcgcctaggaagaagaccgccgctgtagcagaggggaatacctccgccgggatagagactctctctatccccgagtacctcgagcgtcacaaagcacagcgtgacgctcttgctgtcaagactgcggcggggacaactcaaccggagattgtcctcgaaggttcctctgtagtcaacgacgctgttgactacggggacggcgacgaggagatggaagagggcgaggcctcttctagcaagcgcaaggagtctatcgacagtgatagtctcgacccgcatgctgggtcgagacgccctcgtgaaggagacgactcggacgcttcgagctcgaagcgtccgcgcggcgagagcgacactccgcgctctgctgctggggctttaagctctccgcgcgctgcctgagcagcgcgcggtccgtggatgccgtccgcgtcagagattgcagaccgtgtgggcaacactgtgcctccaaacgaaatcacgctgtacgtatgcagcggtatccacgacgatgctgttgcggaggggcagcgctttgatccgttaacgaatcaaaggcgcgattattacatcgggctcttccacgagctccggtacttctccagcaagaagacctcttatcgcagcaaagtgcctgagtggcaggcactttgtcaaagttggaacgcttttgttgaaaacttcaacaggaaaccggctgcttaccgcgagcgggttaagcatgcccgtgaacgcttcaagacattcccgaggctggagcagctccacagatcttctgtggacgctggtattccatgcgctgtgcccgaagaccaaccgtgcacgttgtgtcttcctggtgcggcgcgcttgagcgaccgcgacctaaacgggtacaccacgattcgtgtacctgctagtctcaaggatctccgtgccaagttcttggcacgcgaggaacgtgacgatcgtgggacttcgggcgctgtaggtgactacagcgctcgcactaccttcgtgtcggcagtgtgtggtgagcttcgtacgccctcaccatttccggaacgtcctgcagcaggatgtcccgcggctcccatgtatcttggtggggcggaaaccctctccaacgaatacgataacgaaccggctgccggttcgttttcgggatactatggttcacaatacgctcaacaatccagcgtgttgagccgcgggcgtcgcggattggaggcggcggtagtgggaacacgccccgggtatggtcaacctggggttggccttggcccaacgctccaggagcgagtcgctgctgtggaacagcatcagagccgggagttcgtcgctctgaagcaggaggtggtgatcctgagggctcaagtcgctcagggttcgcagaccgcgtcggacatctctgtcgacgtgggagatcgcgtcgcacgcttggcccagcacgttcacgcgttggagcagaggttcgctcccgctggggcttccgcttcgagccagccgagctaggtggctcgtgctggcggtatggtttcagccacccgacgtaaaaggtcggatggaggcgcatgctagatggaatatctagcgtgtaagcgttgccatgccgtgccaacaccgtgaacggcccgatgaagcacggagcgagcatgctcgccccgaagtcggaaactgcatgtttaggtatgctaacaaaaccaatgaactcttcttgaacccattagtgttgcccctaccaacattgtctgcgttcagcttctgtcggtcgacagaagctgcaatagcgtcttggacaaacctaataacggcttgtctgtgctgcacgtagttgattgcgtccgagctgaattcattcagctcgtttcaagcagtaggtccggcctctgcgttcgtcttcgcggtgtatgtgccctgcacagacccgttcttcttgttcttgttcttgttggtgtctgtgccccgcacagacacgttcttcgtgcgcttatcggtgtctgtgccctgcacagacgcgcggttcgtggctttacttcgtgtcgttgcggctgacactgtgcaagtgtcagcggctgctgcgttgcagtcggagatcctcccccacttaaggaaggagccaccatcccgagtagactcgggaggcgtgggtgcctgatggcattcacgtagaacggtgtatgcccggtcgaggtatgcaccgagtggttgatggcgaactccgccatcggcaggcactcgctccagtgttggaacgagtgagcgtagctcttaagcacgtctacgagcacgcggttcacgcgctcggtctgcacgtccgtctgcggatggtctgcagtcgacatcgaaagttgactcctaagaagtgtaaacacttcttgccgaaggtgtgcagtgaagcgcgggtctcgatccgacacaatgtcgatcggcatgccatggtgtttgaacaccatgtcaacgaacagacgtgccgtctgtttcgcagtcacttcagcaggtaccgcagcaagatgtgccatcttgctgaagcggtcaacaaagaccacaatgcccgtgttcccctggctgtccgggggaagaccgaacacgaagtccaaagacatggactgccaacactccgacggagccggcagtgactgcaagggagcctgcgcggaaggcgcaggcttcacacgttgacaaacctcgcaagcaaagacgtacttgcgcacccatttgtactggtgggcccagtagaagtcccgcgtaaggagaaggtatgtcttctcacggcccggatgccccgcagtcggtgcatcgtgatactaatacatgatcctgagtcgcaggtcttggtcattgggcacgacaacgcggaccgcgttgtcgtcgactgcactgtagagtaataacccgtcgtgcacccgataacagtgtgcacgagcacgaagatgcttcggcagcttctgacgagctttgtcagtaggccctgagccataggccagcaagagcttcgcgtccgcgtcgtgcgcggacgcgaccttcacgtcgtccaacagtggcgacgttggtgtgctcgatcgcatggcgtcaatggcattgacgtcggcatcagtcgtggcgtagtcaggtcgacgcgagagcgcgtcggccacgaagaatgagagccatctcgccatccgttgcgagatgtgcggcgacttcacagccgtccgcagcgacgcgtggtctgtatagaccacgaacggtttgcttccgagtagatacactcggaacttcgcgagtgcgtacatcatggcaaggagctccttgtcatgtaccgggtagttgcgctcagctggcttcagctgacccgattggaaatagacgacacgatcacgaccctcgtgatcgggctgcatcaacgcacatccgattgcgaagtcggatacgacgcacacaacgtggaacgggcgatcttggtcggtcaccgctaaggtcggcgcctcagtcaagccccgcttgactgcatcgaaggcctgctagtccaaatccactcggcgtccttcttcaggagctgtgacagcgggcgtatcatgcccgcgtagttcttcacattactaacacaagtacgtggccaagccaaggaactgccggagttccttcacgttcgacggcgtcggccactcattgatcactctgaccttctcagggtcagggcggacaccgttcttcccaacgagacacccgagcacgggtatctcgctcgccccgaagatgcacttcttcaggttcgcatagagcttgtgcttgcgcatgagcgcaagcagcttccggagatgcaccttgtgcatcgcaacatcgctcatcccgtccgcaacccggctgtggacgaacacatcgtcgaagtagctcggtgcgaagtcgcgcaccgagcgcaacaagtgcgtcacgcacctgttgaaggtcgcaggaccgttcttcagaccctgcggcatcactagccactcccagagcatgccgctcggcgtgctcacagccgtgagagggatatcgctctcacgcatgaggatttgatagaacccatcgcgcagatcaagagcactgtagatagtgctcctggccatcgaatcgatgatgacatcttttcgcggtatcggtgtctgcgccggtatcgtcgcatcgttcagcttgttgtacgcatgaacgatgcgccaaccgccctgtggcttcttgacacagaacgtcggagcactgtgcggggattccgattcccgcacttgtccagctttgcgacgactctcaaagaagtcgtcgatcgccttgacctgctctcgcggcagtggccactgccgcgtgacacagtacttcgtgcccggcacgagatcaatctcgtgctggatgcccttgtcctgcggaagctccgtagggatctcttccggaagtacgtccgcgtactcccatagaatctcgtagaagggactcgtcttcagcgagtcccagctctgctcctcaaagcgctccttcttagtcttcgcactgagagtgtcctcgctctcagtggtggtctccatgaagaactacctcagttcttcattctcgctcttcgttctctcggcgtccgagagaatgcatatttgctcgatgcgtccatcgtgcaagtcacgcgcgaagcgtttccagcttatgactggaagcgaagtcaactccgacgattgcgtcgaaggattagcgatagtcatctccctgtaccggaacccgggacaggtacgcgtcaagacgttcaacgtctcgacgtccggcttctcagcctctgtctgcccggcagacatttcttgtagcgcctcgtccccaggacgagacttgcgtagcggccttcgcatgcgccgtcttcttgttttgcggagtccggctccgattggttcttgacctcgtccaggcccagccgtggacgagtgttcttcttgtataccgccggccggtatatcccgcgggcgggcgacttcaaacccggcttggtcgcctggcgcttcgtcgtgcagcccggctgcacgacagcatgcaagtttttccggtgcgggacatttgcaaccgtccacaccgcttgcagcgtcggctcccggaaccgacacgccatctttacctcgacgcctgttattggcggagctcttcgttacaaagggcgcgtcgactcccggagtcgacgcgaaattccttttggcagcgccagttcccggaaccgtcgcgactttaatacctcgacgccaaccattgccggagtcccctattacgtagggtgcgtcggctccccgagccgacgaatcaaattcacccaatccatcgactcccggagtcgacggcgtttcgtcaccttgactcttattattgaccaaaactgattcaatcagattcgcgtcagcctccacggctgaggcgtgcggctcgcctgcgtcatccatgcccgttgaggtcggagactcttcttgattcgctgaaaagcgggtgtcgatctccgagatcaacacatttccttgattagctgtcggtggcgacgccgacgctagctgctcttgcgcgcgtgctcgcgcgcgcccagggcgctccggaacagcagcatcaggcgctgtctcgagtggggagtcgcgcgcacctgtcggtgcgtgcgtagcggcaacagggccatcgctcactgttccgctgtcgcgaccgaagtgcacgagagtgcgcttctcccaatcgacgaccgggtaatgctgtgcaagccacggcatgcctaatacaatgtcaaacttatcgtccagatccaggacgataaaggtctcgacaaactctgatcttcatacgtgaagcgcacgcgtaccatgcgcttctcggtcttcacgacggcacccgttaccagtcgtacctccagcatacttcgaggtatctttaaatcctcgaagtcaagccttgatagacttcgcagtcgaacaaagttgttcgacgcgcccgaatcaaccaaagcacgaagagggttgctctctctctcttcgaagacacgttcaagatgacaaggttcggtttgccatcatgcattttgcagtaagaagggtcctcactggggactgcagtcctcagtgtcgcatgttcgagttggatatgcgtgactgcttcgccagtagggcgccccgcgcctactgggctccagcgtttttgtttgtccgcgacgatgcccggcatcgccgcgtcgaccaccatctcggtgcacgggtgccgtgcacactcgggcatagtaaccgatccttccgcaacggaagcatggtacattacttccttgttgctgttgataatcaacagccgttgcattcgagaggttcattggttccggacctcccgctatcgcaaccggaggcgatcgcagcctcggcgcattcgcatacagcttagcctgccgcaggctaaactcctcctgcattgcaagagtaattgcagcttcgagagtactcgggtactcacggaagagataggtcttcacaggcccatttctaagtcatttcatgaacgtgacgaccttagtcgcctcgtctatcgggttggtcacaatattcgagaccaaataccgtgctctctgcgcgtaagcatggacatcatgctaaccctgctgtaggtcgaggaactctgccctcgaccggaactcgttttgcgggggctcaaatgcttgtctgagctcatccttgaaaccctcgtacgtgctgaagcacgtaggatcagagagtcggcgtccatacgcccaacttctcgctcgtccgccaaggcatgacatggcgaacgcaaccttggacaacgacgtcgagccgcaatggcagtgtcgagttcgacaagctaacggaggagaggctcgccctctcttccgacatagttgctcacgtttagcttcaacgactgtccacgcggtgtcgtctccgacgccaccgtggtagaggaagcagcatcacgctgctccttcatgataaacccgagagcaacaccatgttgctctgtcgacgatagcgtacgcagcatcgcagctactgccgcctccccaatgactgttgacagtcgttggagtgcctcccactctggatccgacaggtggaggcagtcagcgcgtgcaacatgagttgcaggcgaagtggagctttccatgggcacctccgcgctcatgaaaaggttctcggcccctcgttcgtacagctccgtaccaatttcaggtagtcggtcgttggacggactacaaagtgcttccaggtgtaatgggcctaccttggctcactactacggcttacacgtatgcgcacgtgtatgaggaagcgtaggtttcttttacttgagttaagtatactcgagatccacaagtatactttaaacaagataaagactccaagtagcgggttttggtaaaagatgagaactgctatttttgttttatgtttctgacttcctcaaaatgtaatattctaaactaggaatctgccaaccgctggttggtaggattctgctaacatgcaattcactcattggctaaaagatgctgctttcagccaattgaaatcctaaatgtgcatggaccacccgtcgtggtggtcgtaaatgtatgtagccattggtgtaccttacaccaaggtcgaggaagtgttcaaacctctaacagacatcgcaacaagtgactgtagccacttgtgcgtgtaaccccgttacatctttcttctattccaggaagaatgccagcgctggaaggtcgtcgtgagactcttgtaaataaagcgacgagagggagttgctgacaggggtggttcgcgcctaatgagatcttgatatatagaaaaattgttttaaaatttgtcctgtcaaaatttgtcccattgtgatactatacataattgtagtgttgatcttccggacggattaaccagttaataagggttttgggcgttggatttcggtgcatctttttaatgcgggataaaacgtgaccaagggcggataaaagggcgtattaaacggagtcgcattaaaccgttttatgtaggttttggaaggcacccattaggcgccttccaaaatggagtatccgttgagccatgtgaatcagaatctccatgcgcaacgcctgaatgcgaaggtccggtcgagttcgagatggaagatttcccggaagagcgaagtgtgattgacacgtctgtctgcgcgatggagctccgtttagataaggtgcaagtggaaggtaacgaccttctatttgtggaaggtctcgtgcaagggcgacgtctgaaaatgttggttgactctggagcgacgcacaccattgtgcgacgcgatctgctagtggctcctgctgggacgcgggaagaaaggattcaggcgaaggaagactgtccgtgactacatcgaagaagttcacggtggacatgacggtggaagatcgcttatgtccagtcgagatggtggagtggcccttacgacaggactttgacggcattctcggtaagtcgtggcttcgtcgtgagaaccccgatattgactgggcggctggcactgtgtcgtagcaacacccacctcgccgtaatttgcctcgagaatggacaccacctccgggttctaaaccggagatcgaatatgtagacgcggacgaatttcaacgcaatctcaggaccgggatgtaacggattttcccgaatacaagacctgtaggaaatagaagtccggtcaggaattggttggagtgcctgaaaatagaagtcatgtatcaaataaaagaccggacatttatttttttaaccctttcgtgagcaagtcactaagtatactatacaaactcaaggtacttgaaaatcaaagggggcattctgctccgttcgagcatgtagccatccctgcctcttgttgggtacacaaatggaacagggcaaaatgcccccaacgggcaggacaaaccttgcgtcttgataggccaaaacaaaatctttatggagggtcgcctcgctgaaagggcgcaagcctcacgcgattgactggggttgcagaggaagcggcaccttgcttcgacggaagctgatctggaaagagttggactacgaatatcttcgctatatcttacgagggatgcgcttgtttgaaagtatccgaaggtgtcgtcgtaggtagtgccccgcgcgcagttttgaaattcgcggcttcgagttcactttccattttgcgagccgctacccagctccgtcaacaaacctcgccgacaagaggtatgctgctggaccccgccacggacgccacgctcgccgacggctagggtggcatgctgcggcccgccacgctgacggcacggagagcatgctgccgaaccccgacacggacgccacgctcgacgccagcacggacggcatgctgccggacccgacgtggacgccagcactgtcggcacgctgccagaccccggcgttgacgccacgctggacaactgcactgtcggcacactgccggacccgacgtggacgccacgctggacaactgcactgtcggcaccctgctggacccgacgtggacgccacgctggacaactgcactgtcggcatgctaccggaccccgacacggacgccacggcagacgactgaacggagggcatgctgccggaccccgacaaggacgccacgctcgacggcacgatggcggaacccggcgtggacgccacgcgcgaccacggcatggtcggcgcgtttgtgtgccccgacgtggatgccacgctcggtcggcacgctgggagggtatgatgccggaccctgacctggacgccatgctcggagctggcaaggtgggcacgctgatcggacgccacggttgacgaccgcaaggggggcttgatgccgaacctagatacagacgccacgctcgacgttagcatcgccaacatcgtgcttcagcaatggcgacatggtgcttcactcttaccaacatgctttgggtcgtgagagtggtagatttactattgagcgcaatggtattaggcaaaaatctggtaaatgtgaatgaaaatgatacgtagaagtttggatcgtacaaatattgcttgcttggcaccagttctctactgagtgcccccattgaagtacatgtatattcatagtatccgacgtcggcaccgtttcccaccatgacgcaacacagcagtgttagtgtacatgaccgagtgatgttcagcagaaattcaagctttacagcacaaatagtagtagatttgatattatatggataggtcatgccctgaaaatatcggcttggagcatgcccacacgagctgcgtgaagacatgcaagcttagcgggagttgtaccgtcggatggacggatcgttgtcgacgtttgcacaggcttgagcggcgcaggaggtatatcccctaacaggtcaggttcgttcagtcgatctccaacgtacgggcgttcagctcatcgcagctgttgaccaaccgtagtccacactgagtagcgtagacttcaggataagggctcgctcaagttcatcaatgttaccaatagagcctgacacggcaacatcgtggccttcggtcgccccacctggcagaaagcttggacatgtacaacaagcgccttttacttgttttacatgtacccactacaacgtgcatgccaacctggcgatctttgcgtcgtccaatcacatgacggtctacagttccgccaatcacgcgcgcaccacgcaggattccgccaattacgcgacggcaatgcagatctccgccaatcacaacacgaaaaagccgaaaaagcgagcccaaaggaaaatagcctgggctcagcttggcgcatcctactttaacttcaacaccaattagtacccggtctcggggctctagtactacacgtactcgtcctcggtctcggggctctagtactgcatgtactcggtgtctgtctcgggcctctagtagttgatgtactccatgtctacctgcagctaccgactgcatcagatttgatgcaccagatttgtggtacttattggtaatgtcacgggtccctagtacttttgtctcgtggctttagcatttcccggcacgtcatggcccgcgtcttggagttaggcatgaggagggcgccgcccttgggttcgcgccagtgggctggcgccagcaaggtcactcaagaagcgggcgaacatgtcgcgaccgaggtatgaagcatgaagatgcccagcgggctgcggcagtgagcacagcgctcttgaaggccttgagaagcagtgaaggcatggctgcgggggccagggcgagtagggccgcgggggccagcgcagtggtggcgcggcaagacgtgtggtgtgatgtcactaaagtaaatttgtaaatagtgacacccgagaagctgctgttaccgaccagttgctaatacacatgtaccgactgtcgatacatagacctcttgcctcaagacgccgatagtagctcgagtgtacgcggccgtggatgtacgcgtctcggagatgtctgctcttagcttagtgcctcccacatcgaggaacgcatcctacagtactgctcgatgatcatgagcaacaggatattcatgctatgacggagttatgtcgtcgtcgtaaggtatacaaatgttcatgggtagttagttcatcatgattaagcttagcggtttgcgctggtgcgatgattattacattggcttggccagtcaggacccctgatcaaaggaaaattctgttcaccaggccagtatagattacgtgcagtcaccgcagatttggccttgcgtgtttaatagaggctagtcaggaaaccttgcaaggaaggagaaaacctgttcaccgttggtaagtgtgctgcagaatatcacgttgcaatgagtggctattcaggaaacctaatgaggataaaacctgttcaccttaaaattgttggcagtattagcgttgcattcttttgatttagcagataacgttactgttggtttgcagtagtttagctttgcttttggtgatgcagttggaattcattgcagtatcatgactactcaggaaaatctaaactaggaaaaacctgttcgccgttcaaggacatcgtactcataagataaccatgaaggttgaggaggttgtcgtctcacccgcatattatggttgaaaaaggggctatggcttcccatattcacagattaatctatagtgtgggcttgtccactctagtgacattcgcctttcgacgtgttaatgtcgctttacttctccacttggctaccacacactgttcttgctttctaatgggtttacatccatgtcgcatcagacagaagcttacattgcagatcgaaacgttgcatgtagtagttcaataatacgcagtcgtagttgtggtaatagagagtgcactcgttcattgtcttacagatagattgtgtgcagtggcaagctggtttcaaacatcaacaatgtctaccggtagtctgggataaacagaggctgtataagcttgtcgtatttattcacggaaatatacttggcagaggcttagtatgagtgccgttttaatgttcatcaaggacagaagtgttttacacttgtcattaatctcatgatgtcgtatgagtgatcgaaagaagcgtagtgttcgtgcttgttatagatttttgacagcggtcattttcgagcgtcaagatgtacgatgttttttttattggaaaaggttattgagttacttgcatgagctgaactctaatatccttgttgcagcgtaagtgatgagatcaccattctgcggtgtgttctgtaccctcgacgaattatccagtggcttgtgttgagagccgtacattctctctctctttccaatgctccacatcgtttctgaggtactccaatgtgccatgaaaatgtcgttgtaggtgctctcgactgggttgcgagatcattttgctcttcctcgtgtccattgctaggttggcgagagagtccgccattttgttgtgtgcccggtagtggtgagtccacgattcaaccctgactctgtcggccaaccttcgacattgcgtgtattttccgcgcaaaccttgtgcttttggctctctccgttcttccatcatgcgtaggatcaacttactatcccctactacgtgaagtccgtatagttgctgagaggccgcataatgtagcagttggtggagaccgttcagttccgcccgattgttagtagtgctggtccggccaagcgaaacacagctgatccatacgattgtaggctcgggatttccgggcgagaactccaccagcacgctgccactgccccctggtccaggatttcctcttgatcctccatcaaagaagcccagaaccgtcgtacgagatggaagcatcgcttcctgcgtagatacgttactttcagtcagcaactgatacgcaatttctgctgcacagcgttcttggaaactctgcgtcgttactggtattctgctacggagccgactgtatgcctcctttagtctttggctgaggcctatactccatgctgcgattgacgtcaccgtagatgctgaagggtgagtcattcctgttcttctccgccatattatgtgtgctgtcgtggccacccccagtctccacatgcgttgtacaatcgtgtacaggtgatccagtgctccctccgtgacttgcgaagaattatcgctggcggcgtccacgcacttctccaacatcagtgtgggtacctgaatcagctgcatgctgaagattttttttatgttagtcctaacggaaacttgctttcgccctgctgtctcccattgcttcaagaacacttgccataggtgctgcgctgtagggcagttccaaaccaggtgcgagagggttagttgatccatgggatcacagcattcctccatacacctcttgtcccgtagtcttctagtcttgattctatacatggtctggagttgaagatgtacgatgttaatagtaagacttatacacatttagtgcgtgttgctttggccaaatgcggtatattcatgcatgtatttgtcggatgcgtacttctcgtgcattccttactacttatataacagtagatataagcgaaagtcgtgcttgcagtttcgttaacgaggcgtttgtactttacgtgccaagtatgacatgagcgatagaattcatgctcttaaactcattcgttaatcgacgattcgccttgccatagtgataagcagaagtaacgttgccatttcagacaaaggcgtagttcggccttgtcaaattacgctatccgacagaggcagatttcaggcttgtcatgttgaagaaacaaagcgtaactctcatcaatgagtttgactgatgtggtattcgtgcatatcttgtcatgtttaccggtagatgcgaacttgttgtgcatgcctggagattaaagacataagcgtattcgtgcttgtctaatgggcgagcaacgggacttttgtcaagacaaccctcttagaataaaccagagtcatcgttcttcatgcatatcgcatgatgttcaatttgggaataccgatcggtaagccattgagtggcatgttttgccgatgcgtggttagatgacatgaaggcccgtctagtatagcattagcgcgccgatggctttacggctgaggcgtttgccagaagcaacttcacattcgcatgtggggcaatattcagggcttattccttcctgttttcgtgggcattgagcaagttcggcgagtcagcattgctgctctcataagctatctcgctggtattggggattagcctcccagcttggcaagtggctagctcatgacattgcgtttcacgcagttaaatagctctgggattgacatccaggcattacggtctcccatttctcggatgtgcatttgcacgtgtcatcgagtggtcgtctggcacggggatttcatccggccggcgcgtcggcaggacatcgacatcggccatggaatatgtttgcgcagattaatcgtccggctggttcgtgtgtcgcttgtcgtgccttgcttcatgtcggcgcttgtcgcgggatgcgctgagttgggcagcagtctggttgggccgtctccttgttgatcgcgtccacatgcaacaccagaatcttcatcacagtcggtgagcggagcggctgcacgaattggcatcgccactacaccgtggttgaggtgcttgtcatcgagtgccgtgcacttgcgggtcttcctcacaggaactggtatggcgcgggatgttgtcgcttgaggcttagcttgagctcataacctatgaaggtaagggtaggatcgtaggaacgtaaagaagaagaagtaggtgaggtggagccgccaaaaggcgaagtaaagtttattagttgagagagctcctgccagaaattacaatgggagactgtatagcatactaaataccacaataacagctttaagagggactgagtaactagctatcagcttttagggagcactgtactatcggttaaagaggttacttcaacagtcctgggcacgctgcgcgcacagctcgtaaaccgcaggcgggtacatacagcgctgccttcggcagcgaaagcaattgatacagcaataatctataaccctgcacgcactccgcgctaaccccaaaaaaaaccttgctggtaaggcatgaaccctacaagctgtttctcagccacagcgcaactatgccacgcacccggtggcgttggtggctccctaagcgggccgcacactcagcctcaatcagctctctagaagtcttccatgtgtagcaaaggcgcttcttagagagcgctctaggtctggatagaagcgggtaatcgtctcctccgtggtatgacagtcgaaagtacctgagaacgcgcagcttgaagcagtaagatactgccactcgtttgtagaccttgggtttcgagccattgccagtggccctctttcttcttgtgcgtggcatagcggtagggcaggctttctagctgggttttgctgatcgaagtgatggcttggcgcgaaatgcaattgtgagggcgagttagcgcgaattcccttagaaatgactggttattctatgagctataacatgaaattaagggtaaagattggctttttatttataacgctactgaattttgattgggcagtcggtggtgtgaactatgatatatctacgaattatgagttctgttgtgcggtattgatgggggactgtatttgaaggtactgtattcttatacattacccccccccccgatagggtccttgtattcgcagggaactctaattccttaccggacactatcccttccggacaaaatatgaaacacttctggggggtcttgccaaaatgaccttgaaaccaaatcgaaatgttttcgcggctgctagggcacatcagggctagaggagatggcgttgattttatccgtggcaaccgcgaggccgcataccaaaaactggatgcattaacgctacggacaggggacccatagtgatcatgatactgttagaaaaggcaaccaggacataatgtgaaacaaggaaaaacgatatatttggtttaccggacgtctatagaccatcagacgatgtactagtagttagaagcagcctaccgaagtatataaaagcattggaggccacatgcatatgctcaagggtcacttagctgtctaatatggtagaattagctcccatccaaccgaggtcgttgccggctcgttacttacccactacggcttcgcactctctctatcgatcatgctagcctttgttagagccgtaacatccatctagagtagataaagtccgtagcaatgttcgcttggcacctttaatcatcacttgcccacaccctgttgcaggtcccatacaaggttgagcccatggtctctactaagtacggatttacattaactgctccgttttgaacacaagaggtagcaatcgaaagcttagaatgtggagaatacacctggctagctcattctgcataaaactgcactgaattgacattatgttggtacttgtgttttcaccttatgttttgctaatacaaatcccaagtaataagtgcttcagaatagtggactgtttcatgttttgtccggaggggatacaagtattcggtattctacgttaataggtatttgcttctacggtataatattcggtattctacgttaatacttacgttttgacaaatcggggtaacctacttggccattttaattcctccgcggctatatcgacttggtctccataaaacgatcgcctaatcatgcacatccactcacatatgaaacgaatggcgggaccccggggtcccccattacgctcgtacttcgtgatgcgtttattttggatcatagtcggtagtgtacgcaccacctgcccgtcaaaagcatgcaaaaatgcagttctaagcttcaattgactataatagagcgctcaaaagcacatggtgtctgtattttctgttatcaccacatcactaagtacgagcgtaatgggggaccgtcccgccattcgtttcatatgtatcgcaaggtttacaaatcgatcgagctaaatcagggtaataatcaatcgattgacgagcaaaataggcaaatgaagcggtttaagtgaaaaccgtgaaaacttttcacaatacatcattgtataataaaacagtaaaaacaaaacggatagactaaagtttgagcagccttgctggggatacgatctgttccagcttctctacaaagcgaacccactcgatatagagctctcggccatgcgcttcactcaagcaagtgccccattggttatatgccacatccaccgtcgattcatctacttccgtgagcaccgtcgtggcccctccttccaaaatccactgcacgtcttgccgcgctccctccgccaaccagttccaagcgttagcttcggaatcggcgatcaacatgatgtatttgtccctccgtagcccatttggctgcgttgaacgtgtgcggcgcgccagtgcaacataccgaagacgaacttctcctggaatgctgtataccacaacgtaggcatgcttgccgaacctttgcaacccttggcatgccattcgtccgctttgagctcggccccagcacctcggcgtcgtcagcacaggaagcaggctggggtccatagctgctccgagtcgtctaacgaccagcgcagacgtctcgtgaagcgcccatgggttctgaaaaatgtgttggtctcgtccaacgccgctggggcatgctccaccgcccagcccagaatatttctgacttgttcagtgcatgggtgttgtagcgagttgagttaaatgtcgttgaattcttgtgctgagtaagggtggaaatggagcgaaggcgacccgtccaagaggtttacgttccagcccagctcgcccgagcctttcaaaatggatcgaggtgatggatcatcgaataaccgatagccatacaggtgacgctgctggcggattgcgtcttcaaagccgtcgtacggctccagcgccttcagtagtaaggcatttttccgtgccaacgctgcacagtggatcgtgagctggaggagagctacgaactgctcgctgtagttcgcagaagaagtatcggatacccttgctgctttgacgcaatgctgcagcttcgtctcctggcactcccgttttagtctcgccaagtcttgtttcatctcggtgcgccaccgtgccactcacgctcgatggtagttgtccgctggtcgggtcgggatcggaagttggcgacacgatcgctgacgtcttggtaccgcacacttcgtgtgtattgttgcatgaagaggttggatcgtggtggaaagcatggaattcgctgctgctgacacgcctcgatacgagtgaactgcgccagtggagcagcacgtatatatattgatagcttgtgctcttcaaagtaaggagacaaacagcctgagagctctgaaatttaaagtttaaaaaaaaagaaattggtgaatggtaaggaggaagtgggttgaccaactcagaaaacctgcacagagctcaaatggccaatgtcgctatggatagtggttgttctcgtagctgatgtatttctttatggctgtatttgcccgcacagtcgagttgactttcaatggcgtactgctctccttgtccacttggataggcctgcctaaatcgtgttggacatcaatttcggtctcatgcaggggccctgcatgagaccgaaattgatgaagtttcgaagatcacaacttttaaaaattaatgcggacagagccacactctaaaacaacaattatttgtaaagattcagggttttactcaactcagctcaaagaagtctagcgggtgatatcgattgctccaagcgcacagcgaaccggatccaatcgatgaacaattccctgccatgcgtctcgctcaagcactcagcccactggtcgtacacgacgtcgatggttgattcatccacctccgtaattgtcacgtagacgccgccctccatgatccactgcacgctttcctgcgcatcttcagccgcttgttggcggtcgaatcagctatcgtcatgatgtacttgtccacgcgcttgccatccgatctccgctctctcgagtgctgagcgagagcgaggtagcggaggttcacctcacctgggatgttgcacactataacgagggcgtcctggtggaagttctgcagcacttggacgctcgtttccccggtctgaacgcgtccccaacttcgaggcgctaccagaacgggccacagtttcttctccatccgcggcaggatcatttcagacacgtcgagcgagcagtggaggcgtcttgtgaacgtagcgtgcgccacaaacgatgttcctgcttcgttacgagtgagcgggacgtagtccaccgtccagcccagaatctttcccacagtcgcagtgcacggatggcgctctccatacgcgatgtcactgtggcacaggataccgtcgaattcggccttggagaacgggctgaagtggaatgacggctcgttgttcgggaagcttactcgccacccgtcctcgtcgccatggcgtggcgtctcctcggcatcttgacttgaattttgggagctaaaggccccaaactcctgcccctcaagacgcagcaccctctcgaacttgctttgcagcgcgatcgcctccttcagcgccaggttttctcgctgtaacgctgcgcactcgatggtgacctgccggaacgcgtcgccaagtgactgctctggattgaggtcggacctcatgcgcgcttcgagcacccggtgttccagctccttctccagacgcagtcgttcttgctgcatactggcgcctcgctccttcttctgcttccgccacttgatcatccgcgcccgctgctgctcacgtcgccactgctcgcgcatggcggactcccagagtttggtcatggcggggtctcccatcgtctcgtcgatggtcatgttgcagttggtgctgctcagcccaggcagtggactggagaaggacttgacagtgtcgaccatgggtctgcgttatagcaaataactcggaatgacgtaatcctagaccacccaccgccccacggagaggaaggggtctcgagcggaagaggttgtggcgttgtaagccaagcccatcctttttctggtatcacgtggtctcgtgcatcaggtgaggtgagctgcgcagaacttcagtactgtcgcagcgcaggccttcaactaatcacagacagcataaggacacaacgaaaagaaagatgttgtctaagacgagaacctaaaacgcactgcacttgtggtttttgctgctggggctgcagcagagtttacggtctcaattgagattttgcggctggatccaccagacagcggtacgaattgttgtccacaagctgcggttccctcaccggacttcctatcttacaggtgatcatcaggtgccgcatatgattccggcttcaagtccgttcgagatccgttgattctgtctctctcttcgctgtaccggaactgtatgtgaagcagacgagccacagagctcaactttccatacccaaaaacctccgaccctccgactttctccgactcgtacacaaaacatgcggataggagggtggtcacctttaactatcacccagctacgcgctacgcgcaaacctaaaacccctaaaggctcgctgcactcgctgggccagaaccctaagccccctgcggctcgcacgcgtcgcctccgcttgctaggtagagcactgctgggtcgtgggtttgcagccgcgtgctacgcacacggactgtcaaaccgcaggcgggggctcgctacgctcgctccgtgccatccatcccaaggctccccgaccaatgagcaaacgggacgactaatctatcttggactgtgtatgcataacactttgggaaggggtagggtaatactgttatgctccgaccgcgcttgactggggatttgtatacctaacatcttaagtgcggtcggagatttgatgatattctaccataacgcagattttgatgactatcatgacaatatgatcattccgtcattatggttcacttcagtatggtgccttattggatcgtggggtcgggagggagggggatcggagtgaaattggtttttgcagtacgataagggcatacttgcacagtgcatacacgtaactggacttcctactaacagatcggctagactcgttacgtcttcaaaatattcttgcaatgcttttgcggtcggcttctacatgtagttgcaaggaacatgcactacagtaatctgcccgagtaaggaacgcctgatatatataaagacgcagaatatataaattgatgttaagttgagtatacttttccaatgtactgatttagttatttcaaaatgaactgaagagcagctttacctacgagtccggaatgattccaacagtggcgtatggtcgaagcactaacctttgaccaggcatcctcgcaccacaacagcgctgtcaactggtcgacctcgtagggattatccagcccttcaccttgtcgagaatgcccactttctcagaccaagtgagacggagacgcttggacggtgtggacttcatgggtgtggagtgggggaggaggtgggcttgtggggcgaggtgcaaaagcaaaagtgcgagtctaccactacggtacatgtagtttgaagtctagtaagatcgctaaatgcgtgccatttttcaaacgagggtggagagctgatgattggcactggatttttcaccttagtacctcagtaccttgcagtaccttgcacatccccctatcgccacatcgactggaaaataatattaaatatgtgaggctattagttgtacacccgttccttattcgggcagaattctgtacagtattagtggtagtaagtagtacagtagcaagctacctggtaggacaaatcatgataaccgttcatcgaatttgcaatacattacggcaccgtagatcttgggattgaacatgcccgcctgctgaaccttccagtgcagtacgtataacggtaagatagttgacgccgatgggaaaactggaactccagctttgacgttcttgctgttcgctcagacaagtccgcattcctcaatttgctctgcaccacacaagccctttcaagtcctcagtggtctgccacccaagtcgaaacatgcgcgtgtgctccgtcctcctagttgctgcagctgctctcatcgcgaccagtaatgctgttgagccttccgccacgtcaaccgttgaggttgctgaggttcaagcgcgtggtgcagacaaacggttccttcgtagccaccagactgagaatgagcaaggagacagcgatgtcaacgaggcagaagacggtattgaagagagactccccaacctgtcgcctgtagacgacgcactcgccgggctcaagaacgcagtgaagatcagccctgacgatgttctggtgcaggcgaataacggcaaaatcgacatgcagcaaaagctcttccaacagtggttgaatggcccgcctgaagtccgacaaaacgcgatcgccaagatcatgagggatggaggatacgagaaatactatacgctgttgaaggcgtgggagcaccacgcaggtagaaccggccagggcatcggcttcctcggcgctaccaatgcggttgatgaactgcttccacaagctgtcatcagtgcggcagctgccggagataagagagcccaggcgacactattccacaggtggatcggcgctgaagagaaaaccaggaatactgcgctcagaatcctccacgaatatggaaaggggatcctagcgtatactagactcaacaatgcgtggttggaattcctacggcgactcatgtaagctcgcaagggtcgtcgcaggcagaactgcggcctcgtctgacccgaagaggtcagattcagggcttgaaatcaacatagcagaaagcttcacctgcaaaagctggtattttatttttattaatcaatgactaataataaagaacaccactttttgctgattaaaaattaccccagtatattaaaaacagtagtacagtaatgtgcgtcaataaggaaccgctaatatggatagaagcaaggaggctattgggccaagcagtgtaacatagacggttctgggtactgtcttagtgcattaaattggaagtatctggtatatttcccggtcaatttctttgaatggttcatctaaatcagtactatcagcgggaaactgggctccttccagccagctgtttgttatatgtacaaggaaattagctccatattgacacacattactgtaaaaggaaccaaagcatatcttgagccaggacatcgacttcagtacgggtgaatagtgttcttatgaaaacttccgtgcaaacttgagaatggagagcctttcgttcttggctttggtagagcgaacgacctggtcagacacaaaacaacggcaatcgaaatttagagcagttgcgtcgtacgagaggaaagcacattggaatgatagcgcaccgtcatctcgaaaccgtccttggctagtatagcagcgatttcattgggtttgttctcgaccacgacgaccatgtagaagaccccacgaggcgacagcaaagcgctaatcttcggcagcaggcgatcaatcacttcacgtccgtgtagaccgccagcccacgctgcctcaatacccctgcagtcattttcaaggttattctctagcacagcatcccagtcaacactatacataagcacacacgtacgtggatccgacctcctccgatggagtcggcacatacggtggattgaacagcagcacatcaacttgtccctacagctccaaaccctcagtgagtgacaaccaataacacgccatttgcatggatcaaatgggcttcgcacctgtatccgtggctcgtaacactgcagcaagtcggtgcgcacgatgtcgaacgcttccgccccgttgttcttggcggtttgttgagcgacccccgccgcgagcggattgatgtccgtggccaggaacatcgctctcgtccccaacttctgcaattgcgtcgccaagtacacgaacacggcgccgcttccacacctgcaaccagtctcagttcaatgcattccagtctgtgccagccaacggattgactcacgcacccgatctccacgcagatcgcggggtccagcgccaccagcttgggcagttcgtcttgcagcgcgtccaggaacaggaacgtgtcctccgccggctcgtagacgtcgcagtcgtacgccatgtcgatctccggtagctccgccatggtctctcggctttcaaagcactgccagttatccccacaggctcgggcgtgtgcaccacatgagactacacagtgatcatgaagggacgcacaggtcggttgccaatattactacggcgatggacttgaccgaggatgaagatggctacaatagcagcaccggcagcgtggacgaagacgccgagctggaactgtcctgcgctctgcatgacttggctctgagggtgaaaaccttcgaggccaacatgcagggccggttccgccaggacctgggcgacgaggaggacgaggaggagatcacggaggacctcgaccattttgaagaggagggagggcccagctactacggacgacatcggatggactcggactcggcgtcgcccaagcgtcgagtgagtagaaggaggaggtcgagtagtggcttcaagacggtcaagcaccagcacggcgatgaagaggacggcgactatgaggacctcgacagcgaccaagaggaccgaccggaggccaagagtgggcgtgacgactcggaactgagtgagggtgaggatgaatgggactcccaggaggagaaagaggagctgtgcgagctcaaacagaacatcgcaaagctgcttcaaagcatgcaggaggaggccaaagccctcgaggacaaccaggcggactgcaaagtcgtagaatagccacgcatatcgtgaagcctgaggtttgataacatgaatgaagcacttcaccctgaaaacaaaaaaaatcgcctgcagcctgtcgctattcagtacacaaagccatcaggcccaggatcttcttacacggttgccaagactttcacaacttgtggcatttgccaccgcattgctcactcccgtcaggcccgctatgtccaccgccctatttcgactgtaaatactccaagaaccgcttctgcagctcgaactcctgttcgcgcagctccgtctccttctgacgctggtccatatcgaactgaatcttgctctcgataagctccaggatccgtgcgcggaagttatcgctactgatagtgtccgacgcggccggcattttcccggccatggcgcccacaggtgactccatctttctccgcttttgcggcagcatggaagggggcacagccggaagagagctgccaaacgttgcgccgtcagtcttcacaatgaccctctccttgccgttgccgtccaccaccgtctgccctgccatcttgtggttcttccggatgagcgtctcgttgatctcgcgcagaatcgtctccttgcgcgcgttctcctccatcgttccgtgcttaaataacttgtcgtgcttgccgtctgtgtacattttcatcagtgccgtcactcggtcactacgcaacaataaaaaatagagtgagaccatgaaaataataaaaaactctcgcatctcctcaactattttcctcaccgacacgtgtgccatgagtacgccgccgggttctgnnnnnnnnnnnnnnnnnnnnnnnnnnnnnnnnnnnnnnnnnnnnnnnnnnnnnnnnnnnnnnnnnnnnnnnnnnnnnnnnnnnnnnnnnnnnnnnnnnnnggccgcgcaccgtgggcttctggggcgcggcagcctgcgctcgccctgcagatataagaaaccattatagcatgtggggggttcacgctatcacgaccgctctgtaactagaacaagcgctgactagtgaatggcagagcagcacgtagctacctgcatcgacacatgcactgcacgcaaagctcacgcagcctacctagctcattgccccgatctactggtaaggtatacaaggtcgtaccggtgctggccggtgcgatcccttcgtcccccatgacgtctcgagacgctgtaaagttaccgaccgctgtttcttcgttcgggccccgaatttctcaaaaatggggaggaaaaatcgagagccagcggttttgagaggttcgacgaccagttttgagagggcctgagcgtgacttgaacaaagtatgaagttgaagtgcgagcttgactgtcaaacttcttagcgatgaaggttatcatttaacgttagcgtcagcgttagcgccaacgagtagcttgaggaccttgctaatacggccttcacttggtctcctcgtcgggggcctcgagcgacttggcggccatctcgagcgcgccttcgtacgtgcggttgccgccgatgaagccggcgctgtgcacaaacgtgcagccctcgatgccggacacagtggacagctccgcgtcgcgcaggccgcgccaagcgggcagcaggcccttgcgcagcgcgaaggatcccggctccgtgttgagcgcctgcacgcgcgtcatgctgcccgtggcgtcgttgtacagcacgaacttgatctggccggagatcatgagcttctcctccaggtcgtgcaggtgcgacttccacgggcagtactcggggaagtgcacgatctcgccggacttgtgcgtctggaagcgcttggacacggccttctccacgatctcacgcgcgggcagccacgagtgcacgaggtcgtggatggcgtccgtgaactccgtgatggtcatgtacatggcctgctggaactgcgcgttgacgcgcgcctcgctctgatcctcgttccagcgcgggttcaggtagcccacgcggttgctgaggctcgaggacacctggtagttgtacgtgatcttggcgtccccggcggcgctggccacctcgacgccgttgtcgatgccgtcgatgtgctcgacgaagttcttgtacgccttctggtgcaaaatgtccagcgtggcgtcgtccagcgtgacgggcgcggccagcacctggatgatctcgcggccgaagtgattgtacacgaggccggcgctcgacagcttggtgtcgcgctggtcgaaggtgcccgcgaaggagcgctggtggtggtcgaagcgcagcgcctgcgcgtcgtacacgccgcccacgtccacgacagcctcgcactgggccagcttggcctcgtcgcgcgtgcgcagcacgtcgtgggccgcgaacttgggcagcagcttcagcatcgacacggccagcgcctcgtcgcagtggaacgtaccgttgtgggtgccgatgtacttcttggcggcgccctcggccagctgggacgtcacctgcgcgctgcggaaggcggcgaagcacggggaggaggccacgaaggcggcggcttttgtcgggacggccatggttgatacaccggttggatggcaccactggaatggaaagtgacttgcgttgactagggcgatttgaagggactattctggagcacaactatttggtacaggtcaaaccgaggactagattacacttgctgtgagtatgacccaagttgaagtggaccaaactaagacgtcgaggttggttcacagcagatttcgtgaatttatgttctctatccgttggacgaatgctacaacgttgtgtgcacgctatggcagtatctcgctctattatctatatctagtgaaaccaaaatctatgaacgtgtcgtgagaggactaaaccgtaggcgcagcctcagcttgctcctgccgaataggacctgtcttgatgaacttggcacaaaagaagcccatggtatcgagctccgtattggcagggtcgaagcgctgcacgagagacgcctcgtggtcgttgagaccttggccagccaacccgcggtcgccgatgtgggcctcgccttgcgaaacaagtttaagcggatagttttgcagtgcgtggtgcaccatctgctcgttctccttcgggttgatcgtgcacgtggagtacacgagggtgccgccaggcttcagcagaaatgccgcaacccacaggaagttgcgctgcatgttggtgtactcagccaagttatcagcatctcccgcgtggagcaaccgagggcgcaagcctagcgccgagcaaggagggtccagcagaatgcggtcgaaggtttcggggaagaacccttctacctggagcagacgtgcctggctgggagtgtccgcctttgcccgagctagaacctgcgccacacaggtaaagtcgctgtttccctgtgcggcagccaatcccgcgtccaccttatccttgggtaggacagcatgggtcgagtccatcttgaggggcacgacacactcgagctgcagatcgtcgcaaagggtccgcagctccaatgccttcctcttcgagcggtcacacgccaccagcgtgcccttgttccgcatcagcgtggccacatgagacgtcttgcctccgggggccgcacacatgtccagaatcgcatcaccctcctgcggatccagagcgtgggccaccaccgagcacggaaggttctggacgtagatctgaccgtgcagcacgccgttcatcggtggagcatcatgacagacccgaaccaactgagtcaccgccagtcccctcacagcccggaaaatctcggtgcgcgccatcttggtcacgccgcgagcaatcagcagcttgcgtccatcgtgagcggcaaagtcgctgccccgcgtgtggttgtggtccagatcaacgaacacattgacctcgtcctcggcgttgatgccgctgctggcgctcatgactccacgcgcgaagatgtcgctgccacgcagcaccgcctcgccgcagagtcggtccaccacgatactcttgagttctgggttgaaatcgaccgcagtatcgccgctagccgccgacgggatcatcagcacgtccggcagcgaggcgtgggcgaaggcctcgatgggctggcgactggcgtccagcgctgccaattgggcgttgaacccatccagatgcggcttcagggcctgcagagcctcgtcccgggaaagcttgagggtgttcactcggacggcggtgaaggcgggcctggggttgttcaaacaagcacggagttagttatttcggctttatgacacgctttttccggctatgtgggacttggggacgtacggtcgggcgagcgcgtgcttgatgttggtccaatggggttcgctgtaggcggcgccgagctcctgctccacttggtcggggaacgtcacggagaacgcgtccagcgtggtggcgcccgggacggcggtcgagtcttccagcggagccatgctgcggggattgtaatgactggtggagtctatgcaattcaaaatagtgcgtcgtgattggctgaaatgtggagctacggtacgagaaggtgagtgacggtcacgttgaagttgatcagagtgatggtcaaatcgtagccgcagatacaccttcaacctcatttgcgaatctaccagcaacagcaactacactacacaccagccatggcctcacgcgcccgtacgtcctccttctcgacacagcgcattgctgcgtcgtacgctgggcgtggcaaacgcgccaaggctatcgcaaccgccgccccaagcaagaggcaaatggccatcatcaactgggagaacgtcctcgcgccgatggactggttggcggtctacctgggcttgggagcgacaaacgaagccatcgagagggcggttgcgcggtacaggagctcgccggatctgcttcagtccctggcggcgatcgaagagcgcgtcatggagcttctgacggagaccatgaagctcattgacgggccagtgttcgttgtgagcgagtacagcaccgcctacgtggagctggtgagcagtttgttcttcccgcggctgacggcggcactgaggaacgctaagagcggaatttacgtcgtcggcacccccaacacgcagctgacagctctggagatgaagcagtggaaggtcaatttgctgcacacggcgatccacgagcacctatttgctgggatcgatgaagtcgtcacaacgaatctgcttgcgcggtcggcgtacggtaggatcaaagtcgtggctctatgcgccaacgaagcggacgccgctgcagcgtccgggatccatttgatcgcgccaaatgcggtcatcaagcatgtgagggttcaaggtccgaaggctggatatacacattcgcctcaaccgccactgtcactagacgacttttacgctcagctacagagcttgatgcagtttgtcagacagaacgcgaactaacctgattacataagatcgaagcggctagcttctccgacttttaaagcaacgtgtatgcctacatacttactttacaattcgcttgacaaatacatgtcctaactagccccggacttggtgaacaccccacgatcccttgcataaagtgcccccccccctctcctcctcccccaaatacaccttgttcacagacgtctcttatgctgacgctcggccaaagcacgagatcatctaaccagggacaaatatattttgtgatgatgatgaggtatattggattaattaaaataatcctaacaaccgtgcatcacgccaattggcaagacacacagacgcagtgctccagcgagcagatattccgcaacactttaccaccaggttagagaacgaaatgaagatcagtagtagcgaaaaggggttccgggatcattattcgattcggaacagttccacatctctatagtttctagttaatctttattacccagcctcaaagcccactggtgggctcggtccaaatcccacgcgtgggctcaaaaacaatagttgtagataagacgttttcgctttccaaagcaatgtaattgattctaaagagctccaaatggcacaatgaagtacaagtgactagccactgacccccagaagcaacagcaattatttatcagatcatagttagtgcggaaagtcgtttggtagtctccgtgcagcctatctacctctaaaatgatagcggcaatggcccaagctctacagacacattgaaaacagcacatcaagctaaatgaattcacgtgatgcatgcactgttgggacataactggttagccttcaactgccataaggcgtcaccttgttgtacccatgacgaaattgtaggggttccgactctgggagtaaatcagtgacccagtaacgctctatcgagttggtagtgcttacaatagagtctacacagtatttgaagtgtttatctggtcggctcttgctaagtttcaccgcctaccaccattggaacggctaagaaacaaaatgtcgaacagctataataggtattttttggcccaatcttagccgctgttgctactaacggaaattaccgaataataccccgggcactatttattagtaccctcccattttcaaaacaaatatgctaaattatggatattacacagtataaacatgatttcgacaatttatactgtgtaatatccataatttagcatatttgttttgtatctttgtatgtaaataacattgtaaccctgggatacacattgggttacgttttagagggtactctacgggtaaggggtattattcgggaatttacgttactgcagtaccctaattagtcgtgtgacttaaatagtcatgcatcgtacttatacgaaattttacggtatgtacatctaaattagtcgtgcacctgaattaggcatgtaccaaaacaatctataggagaacactggttaagcttgacagccaaccactccaccgccggctacaccgtgctgttctaagaccacagcactcccattctccaattacaatggccgacgacgcagcacgaagcctgcagcaggtcgtgcctctatgcgaccgggttcggtgcaccgactggatggagctggaccaagcccttcgcggctcgaaaggtctctacgggcgaacagtggacttcttctcggccctcttccgcttttccgaccggcgtgtgaacatgaacaaggcccgtgactggtggaagaagcgagaagagacagcggccagcctcgaagacccagcgcagctcaagtttgcgaccagccgacagcgcatccgccaccagttcgttgtggagacgctgtggtggagtggatccgctggaattagcagggatcccacactcacacactgcgcccagacaccgactaacggagggggtactccgataaccgtaggttgctgagtggttcaccttgtgtacccgtcggcgggcgggatctgctctctcgttgacacgagatgcgcagcgggtgaacttgaatgtccttggcggggacttggggagatgttggggtagatccgctgtggaggttccttcacgcgggtctgggtaggttgatccttggtcttggccgtagatcttgtggatccgataagtaatatagcggatccggagttgttgctgtaatgggcctactttggctcactactttagcatacacgtgtgcgcatgtgtacgaggaagcgtagcttagtttacgctagagttaattatactcggaccgccgagtatagattaatctaaataaacgatccaaataatgttgttgggctaaaatgagaactgctatttttgttttatgtttctgacttcctctaaatgtaatattctaaactgggaatctgccaacggctggttggcagaattccaatgctatgcatgtcgctcattggctaaaagatgctgttttcagccaataggaatcctaagtctctatggaccacccgtcgtggtgatcgtaaatgtatgtatcctttggtgtgtctacaccaagtacgagaaagtctttcaaacctctaacagacgtcgtgtctgttagagttacaagtgactgtagccacttgtgcgtgtaaccctgttaaaccaccccccccccctcaaggttagacgcgccgagtcacggcacgtcaatcaggaaattgaccattcgtcaattcttcacgttgggagaaaaaaaaatcgagatcattccgcaaagagatcgcctcagaagaagaccgccgctgaagcagaggggaatacctccgccgggatagagactctctctacccccgagtacctcgagcgtcacaaagcaaagcgtgacgctcttgctgtcaagactgcggcggggacaactcaaccggagattgtcaaggttcctctgtagtcaacgccgctgttgactacggggacggcgacgaggagatggaagagggcgaggcctcttctagcaagcgcaaggagtctatcgacagtgatagtctcgacccgcatgctgggtcgagacgccctcgtgaaggagacgactcggacgcttcgagctcgaagcgtccgcgcggcgagagcgacactccgcgctctgctgctggggctttaagctctccgcgcgctgctcaggcagcgcgcggtccgtggatgccgtccgcgtcagagattgcagaccgtgtgggcaacactgtgcctccaaacgaaatcacgctgtacgtatgcagcggtatccacgacgatgctgttgcggaggagcagcgctttgatccgttaacgaatcaaaggcgcgattattacatcgggctcttccacgagctccggtacttctccagcaagaagacctcttatcgcagcaaagtgcctgagtggcaggcactttgtcaaagttggaacgcttttgttgaaaacttcaacaggaaaccggctgcttaccgcgagcgggttaagcatgcccgtgaacgcttcgagacattctcgaggctggagcagctccacagatcttctgtggacgctggtattccatgcgctgtgcccgaagaccaacagtgcacgttgtgtcttccgggtgcggcgcgcttgagcgaccgcgacctaaccgggtacacgacgattcgtgtacctgctagtcttaaggatctccgtgccaagttcttggcatgcgaggaacgtgacgatcgtgggacttcgggcgctgtaggtgactacaccgctcgcactaccttcgtgtcggcagtgtgcggtgagcttcgtacgccctcaccatttccggaacgtcctgcagcaggatgtcccgcggctcccatgtatcttggtggggcggaaaccctttccaacgaatacgataacgaaccggctgccggttcgttttcgggatactatggttcacaatacgctcaacaatccagcgtgttgagccgcgggcgtcgcggattggaggcggcggtggtgggaacacgccccgggtatggtcaacctggggttggccttggcccaacgctccaggagcgggtcgctgctgtggaacagtatcagagccgggagttcgccgctctgaagcaggaggtggtgatcctgagggctcaagtcgctcagggttcgcagaccgcgtcggacatctctgtcgacgtgggagatcgcgtcgcacgcttggtccagcgcgttcacgcgttggagcagaggttcgctcccgctggggcttccacttcgagccagccgagctaggtggctcgtgctggcggtatggcttcagccgcccgacgtaaaaggtcggatggaggcgcatgctagatggaatatctagcgtgtaggcgttgccatgccgtgccaacaccgtgaacggcccgatgaagcacggagcgagcatgctcgccccgaagtcggaaactgcatgtttaggtatgctaacaaaaccaatgaactcttcttgaacccattagtgttgcccctaccaacattgtctgcgttcagcttctgtcggtcgacagaagctgcaatagcgtcttggacaaacctaataacggcttgtctgtgctgcacgtagttgattgcgtccgagctgaattcattcagctcgtttcaagcagtaggcccggcctctgcgttcgtcttcgcggtgtatgtgccctgcacagacccgttcttcttgttcttgtcagtgtctgtgccccgcacagacccgttcttcttcttcttgttcttgttgatgtctgtgccccgcacagacacgttcttcgtgcgcttgtcggcgtctgtgccctgcacagacgcgcggttcttggctttacttcgtgtcgttgcggctgacactgtgcaagtgtcagcggctgctgcgttgcagtcgacgcgaagctcttgctggcctatggctcagcgccttctgacaaagctcgtcagaagctgccgaagcatcttcgtgctcgtgcacaccgttatcgggtgcacgacgggttattactctacagtgcagtcgacgacaacgcggaccgcgttgtcgtgcccaatgaccaagacctgtgactcaggatcatgtataagtatcacgatgcaccgactgcggggcatccgggccgtgtgaagacataccttcttctcacgcgggacttctactgggcccaccagtacaaatgggtgcgcaagtacgtccttgcttgcgaggtttgtctacgtgtgaagcctgcgccttccgcgcaggctcccttgcagttactgccggctccgtcggagtgttggcagtccatgtctttggacttcgtgctcggtcttcccccggacagccaggggaacacgggcattgtggtctttgttgaccgcttcagcaagatgtaccatcttgctgcggtacctgctgaagtgactgcgaaacagacggcacgtctgttcgttgacatggtgttcaaacaccatggcatgccgatcgacattgtgtcggatcgagacccgcgcttcactgcacaccttcggcaagaagtgtttacacttcttaggagtcaactttcgatgtcgactgcggaccatccgctgacggacgggcagaccgagcgcatgaaccgcgtgctcgtagacgttcttaagagctacgctcactcgttccaacactggagcgagtgcctgccgatggcggagttcgccatcaacaactcggtgcatgcctcgaccgggcatacacccttctacgtgaatgccatcaggcacccacgcctcccgagtctactcgggatggcggctccttccttaagtgggggaggatctcccgcacgacgcggacgcgaccttcacgtcgtccaacagtgacgacgttggtgtgctcgatcgcatggcgtcaatggctttgacgtcggcatcagtcgtggcgtagtcaggtcgacgcgagagcgcgtcggccacgaagaatgagagccatctcgccatccgttgcgagatgtgcggcgacttcacagccgtccgcagcgacgcgtggtctgtatagaccacgaacggtttgcttccgagtagatacactcggaacttcgcgagtgcgtacttcatggcaaggggctccttgtcatgtaccgggtagttgcgctcagctggcttcagctgacgcgattggtagtagacgacacgatcacgaccctcgtgatcgtgctgcatcaaagcacatccgattgcgaagtcggatacgttacacacaacgtggaacgggcgatcttggtcggtcaccgctaaggtcggcgccccagtcaagccccgcttgactgcatcgaaggcctgctgacactcagcagtccaaatccactcggcgtccttcttcaggagctgtgacagcggacgtatcatgcccgcgtagttcttcacattactaacacaagtacgtggccaagccaaggaactgccggagttccttcacgttcgacggcgtcggccactcattgatcactctgaccttctcagggtcagggcggacaccgttcttcccaacgagacacccgagcacgggtatctcgctcgccccgaagatgcacttcttcaggttcgcatagagcttgtgcttgcgcatgagcgcaagcagcttccggagatgcaccttgtccatcgcaacatcgctcatcccgtccgcaacccggctgtgggtggacgaacacatcgtcgaagtagctcggtgcgaagtcgcgcacctgttcaaggtcgcaggagcgttcttcagaccctgcggcatcactagccactcccagagcatgccgctcggcgtgctcacagccgtgagagggatatcgctctcacgcatgaggatttgatagaacccatcgcgcagatcaagagcactgtagatagtgctcctggccatcgaatcgatgatgacatcttttcgcggtatcggtgtctgcgccggtatcgtcgcatcgttcagcttgttgtacgcatgaacgatgcgccaaccgccctgtggcttcttgacacagaacgtcggagcactgtgcggggacttcgattcccgcacttgtccagctttgcgacgactttcgaagaagtcgtcgatcgctttaacctgctctcgcggcagtggccactgccgcgtgacacagtacttcatgcccggcacgagatcaatatcgcgctgaatgcccttgtcctgcggaagctccgcagggatctcttccggaagtacgtccgcgtactcccgtagaatttcgtagaagggactcgtcctcagcgagtctcaactctgctcctcaaagcgctccttcttcgtcttcgcactgagagtgtcctcactctcagtggtgctctccatgaagacctgcctcagttcttcattctcgctcctcgttctctcggcgtccgagagaatgcatatttgctcgatgcgtccatcgtgcaagtcacgcgcgaagcgcttccagctcattactggaagcgaagtcaactccgacgcttgcgtcggaggattagcgagagtcatctcccagtaccggaacccggcacaggcgtcaagacgttcaacgtctcgacgtccggcttctcagcctctgtctgcccggcagacatttcttgtagcgcctcggccccaggacgagacttgcgtagcggccttcgcatgcgccgtcttcttgttttgcggagtccggctccgcttggttcttgacctcgtccaggcccagccgtggacgagtgttcttcttgtataccggcggccggtatatcccgcgggcgggcgacttcaagcccggcttggtcgcctggcgcttcgtcgtgcagcccggctgcacgacagcatgcaagtttttccggtgcgggacatttgcaaccgtccacaccgcttgcagcgtcggctcccggagccgacacgccatctttacctcgacgcctgttattggcggagctcttcgttacaaagggcgcgtcgactcccggagtcgacgcgaaattccttttcgcagcgccggttcccggaaccgtcgcgactttaatacctcgacgccaaccattggcggagtcccccattacgtagggtgcgtcggctccccgagccgacgaatcaaattcgtcgatgcgacttcaatacctcgacgccaaccattggcagagacccccattacggagggtgcgtcggctccccgagccgacgaatcaaattcacccaatccatcgactcccggagtcgacggcgtttcgtcaccttgactcttattattgaccaaaactgattcaatcagattcgcgtcagcctccacggctgaggcgtgtgactctcctgcgtcatccatgcccgttgaggtcggagactcttcttgattcgcggaaaagcgggtgtcgatctccgagatcaacacatttccttgattagctgtcggtggcgatgccgacgctagctgctcttgcgcgcgtgctcgcgcgcgcccagggcgctccgggacagcggcaataggcgctgtctcgagtggggagtcgcacgcaccgacaggtgcgtgcgtagcggcaacagggccatcgctcactgttccgctgtcgcgaccgaagtgcacgagagtgcgcttctcccaatcgacgaccggataatgctgtgcaagccacagcatgcctaatacaatgtcaaacttatcgtccagatccaggacgataaaggtctcgacaaactcttgatcttcatacgtgaagcgcacgcgtaccatgcgcttctcggtcttcacgacggcacccgttgccagtcgtacctccagcagacttcgaggtatctttaaatcctcgaagtcaagccttgatagacttcgcagtcgaacaaagttgttcgacgcgcccgaatcaaccaaagcacgaagagagttgctctctctctcttcgaagacacgttcaagatgacaaggttcggcttgccatcatgcattttgcagtaggaagggtcctcactggggactgcagtcctcagtgtcgcatgttcgagttggatatgcgtgactgcttcaccagtagggcgccccgcgcctactgggctccagcggttttgtttgtccgcgacgatgcccggcatcgccgcgtcgaccaccatctcggtgcacgggtgccgtgcacactcgggcatagtgaccgatccttccgcaacggaagcatcgtacattacttccttgttgctgttgataatcaacagccgttgcattcgagaggttcattggttccggacctcccgctatcgcaaccggaggcgatcgcagcctcggcgcattcgcatacagcttagcctgccgcaggctaaactcctcctgcattgcaagagtaattgcagcttcgagagtactcgggtactcacggaagagataggtcttcacaggcccatttctaagtcatttcatgaacgtgacgaccttagtcgcctcgtctatcgggttggtcacaatattcgagaccaaataccgtgctctctgcgcgtaagcatggacatcatgctaaccctgctgtaggtcgaggaactctgccctcgaccggaactcgttttgcgggggctcaaatgcttgtctgagctcatccttgaaacctcgtacgtgctgaagcacgtaggatcagagagtcggcgtccatacgcccgacttctcgctcgtccgccaaggcatgacatggcgaacgcaaccttggacaacgggtcgacgatacgtcgagccgcaatggcagtgtcgagttcgacaagccaacggaggagaggctcgccctctcttccgacatgttgctcacgtttagcttcaacgattgtccacgcggtgtcgtctccgacgccaccgtggtagaggaagcagcatcacgctgctccttcatgataaacccgagagcaacaccatgttgctctgtcgacgatagcgtacgcagcatcgcagccactgccgcctccccaatgactgttgacagtcgatggagtgcctcccactctggatccgacaggtggaggcagtcagcgcgtgcaacatgagttgcaggcgaagtggagctttccatgggcacctccgcgctcatgaaaaggttctcggcctctcgttcgtacagctccgtaccaatttcaggtagtcggtcgttggacggactacgaagtgcttccaggtgtaatgggcctaccttggctcactactacggcttacacgtatgcgcacgtgtatgaggaagcgtaggtttcttttacttgagttaagtatactcgagatccacaagtatactttaaacaagataaagactccaagtagcgggttttggtaaaagatgagaactgctatttttgttttatgtttctgacttcctcaaaatgtaatattctaaactaggaatctgccaacggctggttggtaggattctgctaacatgcaattcactcattggctaaaagatgctgctttcagccaattgaaatcctaaatgtgcatggaccacccgtcgtggtggtcgtaaatgtatgtagccattggtgtaccttacaccaaggtcgaggaagtgttcaaacctctaacagacatcgcaacaagtgactgtagccacttgtgcgtgtaactccgttacatctttcttctattccaggaagaatgccagcgctggaaggtcgtcgtgagactcttgtaaataaagcgacgagagggagttgctgacaggggtggttcgcgcctaatgagatcttgatatatagaaaaattgttttaaaatttgtcctgtcaaaatttgtcccattgtgatactatacataattgtagtgttgatcttgcgtctgggcagttttacccggacggattaaccagttaataagggttttgggcgttggatttcggtgcatctttttaatgcgggataaaacgtgaccaagggcggataaaagggcgtattaaacggagtcgcattaaaccgttttatgtaggttttggaaggcacccattaggcgccttccaaaatggagtatccgttgagtccagaatctccatgcgcaacgcctgaatgcgaaggtccggtcgagttcgagatggaagatttcccggaagagcgaagtgtgattgacacgtctgtctgcgcgatggagctccgtttagataaggtgcaagtggaaggtaacgaccttctatttgtggaaggtctcgtgcaagggcgacgtctgaaaatgttggttgactctggagcgacgcacaccattgtgcgacgcgatctgctagtggctcctgctgggacgcgggaagaaaggattcaggcccgcgactttgaaggaagactgtccgtgactacatcgaagaagttcacggtggacatgacggtggaagatcgcttatgtccagtcgagatggtggagtggcccttacgacaggactttgacggcattctcggtaagtcgtggcttcgtcgcgagaaccccgatattgactgggcggctggcactgtgtcgtagcaacacccacctcgccgtaatttgcctcgagaatggacaccacctccgggtcctaaaccggagatcgaatatgtagacgcggacgaatttcaacgcaatctcaggaccgggatgtaacggattttcccgaatacaagacctgtaggaaatagaagtccggtcaggaattggttggagtgcctgaaaatagaagtcctgtatcaaataaaagaccggacatttatttttttaaccctttcgtgagcaagtcactaagtatactatacaaactcaaggtacttgaaaatcaaaggggcattctgctccgttcgagcatgtagccatccctgcctcttgttgggtacacaaatggaacagggcaaaatgcccccaacgggcaggacaaaccttgcgtcttgataggccaaaacaaaatctttatggagggtcgcctcgctgaaagggcgcacgcgattgactggggttgcagaggaaacggcaccttgcttcgacggaagctgatctggaaagagttggactatgaatatcttcgctatatcttacgagggatgcgcttgtttgaaagtatccgaaggtgtcgtcgaaggtagtgccaggttggcatgcacgttgtagtgggtacatgtaaaacaagtaaaaggcgcttgttgtacatgtccaagctttctgccaggtggggcgaccgaaggccacgatgttgccgtgtcaggctctattggtaacattgatgaacttgagcgagcccttatcctgaagtctacgctactcagtgtggactacggttggtcaacagctgcgatgagctgaacgcccgtacgttggagatcgactgaacgaacctgacctgttaggggatatacctcctgcgccgctcaagcctgtgcaaacgtcgacaacgatccgtccatccgacggtacagctcccgctaagcttgcacgtcttcacgcagctcgtgtgggcatgctccaagccgatattttcagggcatgacctatccatataatatcaaatctactactatttgtgctgtaaagcttgaatttctgctgaacaccactcggtcatgtacactaacactgctgtgttgcgtcatggtgggaaacggtgccgacgtcggatactatgaatatatatgtacttcaatgtgggcactcagtgaagaactggtgccaagcaagcaatatttgtacgatccaaacttctacgtatcattttcattcacatttaccagatttttgcctaataccattgcgctcaatagtaaatctaccactctcacgacccaaagcatgttggtaagagtgaagcaccatgtcgccattgctgaagcacgatgttggcgtagggttcgagtagcgtcccatccatgctaacgtcgagcgtggcgtctgtatctaggttcggcatcatgccccccttgcggtcgtcaaccgtggcgtccgatcagcgtgcccaccttgccagctccgagcgtggcgtccaggtcagggtccggcatcataccctcccagcgtgccgaccgagcgtggcatccacgtcggggtacacaaacgtgccgaccatgccgtggtcgcgcgtggcgtccacgccgggttccgccatcgtgccgtcgagcgtggcgtccttgtcggggaccggcagcatgccctccgttcagtcgtctgccgtggcgtcaacgccggggtctggcagcgtgctgtccgtgctggcgtcgagcgtggcgtccacgtcgggttcggcagcatgctgtccgtgctggcgtccagcgtggcgtccacgtcgggtccggcagcatgccgtccgtgctggcgtccagcgtggcgtccatgtcgggtccggcagcatgctgtccgtgctggcgtcgagcgtggcgtccacgtcgggttcggcagcatgctctccgtgccgtcagcgtggcgggccgcagcatgccgccctagccgtcggcgagcgtggcgtccgtggcggggtccagcagcatacctcttgtcggcgaggtttgatgacggagctgggtagcggctcgcaaaatggaaagtgaactcgaagccgcgaatttcaaaactgcgcgcgggggggtctactgacgcgatctttgcgtcgtccaatcacatgacggtctacagttccgccaatcacgcgcgcaccacgcaggattccgccaattacgcgacggcaatgcagatctccgccaatcacaacacgaaaaagccgaaaaagcgagcccaaaggaaaatagcctgggctcagcttggcgcatcctactttaacttcaacaccaattagtacccctaaaaatcgttcagatgctggcaaaatggagggggatggcctgcgaggccttggcgccattgcgtacattctagttcatattccagacgtggttctacgcgtactagcgccaccctcagtagttccgctcgtgccgcgtcgtggtgcgcccgcagcccacggaatagctctagaccaccatcgccgagatcgacgagtgtgaagtcctcacacatttggctcgtcgcggccgtgaacaggcatgggctgttggccccaacgacccgagcacgacccagatttgcacccaagtccgaaacaagcgcagcacgtgaaagcaccccgccgctacgattatgggggatcgcagagctcatgatacaggcgcccgtgctttaggtaatgcagcgacgagtgcccaccacacccgcaccccacgcgtgcatcggcaccttccctacactacttactgaccgctgcaggtggcattttcccaccacgtaatgtaacctggtcgctaccacccggccacacggcctcggggcagttgtgatcgacgtagcgctgtgagaacactgcattaattgaccgtaacgcttggtggaagggccaatcatgcccgctataccaacttactatgtactcaggattcgtactcaatcagtacagattaaattcaaatctgaaacaatgcgtatcaatcgcgtataaacctgtgttagccgtctgatgtcgtagtcatcacgatggctacttagctgaggtctacaccgttgtgggcatcgtgatttggtgatcttatgatgctcaccaaacccctacttactttttagtctagattggcatcccgtgggtacctaaaccgcgcgatcatgtcagccgagttgcgctaacatgagcaggttgtgactactcaggttagcgcaactcgattggcatttccgcgctatgcaacatcgcagagacgtgtacaacggttcttctggtccaacctggttaccaaatcacttacttcgaaagactagcacctctttctatgaagttgcaagtcttgaccgcagcgcagccagacttccattcttatatgctaataaacccattattgcttgggattagtgtcgttgggtcggactcgcccgtcgctaccgacgccgataggtatgcgttttgtggtcatcccgacccagtgcctacaaatgaaacataagtcacgtagttttgtaaaataccgaatacgccatccacctccattttgccagcatctgaacgatttttaggggtactaattggtgttgaagttaaagtaggatgcgccaagctgagcccaggctattttcctttgggctcgctttttcggctttttcgtgttgtgattggcggagatctgcattgtcgtcgcgtaattggcggaatcctgcgtggtgcgcgcgtgattggcggaactgtagaccgtcatgtgattggacgacgcaaagatcgcgtcagtagacccccccgcgcgcagttttgaaattcgcggcttcgagttcactttccattttgcgagccgctacccagctccgtcatcaaacctcgccgacaagaggtatgctgctggaccccgccacggacgccacgctcgccgacggctagggcggcatgctgcggcccgccacgctgacggcacggagagcatgctgccgaacccgacgtggacgccacgctggacatctgcactgtcggcacgctgccggactccgctcctggatgacagcacgctcggtggaatccaccgccgaggtgaagccaattgacggccagggcgacttgctgctcgactcccgctcgacaacgactcggagggcctgcttacaaagcccaacgggggtggcacgcttgacgaccgcacgcacggcatgttggcggaccccgccgcggacgttatgctcgcggacctccccgcggacgtcatgctagtcgatggcaaggccgatatggtgtcggccccctgctcattagactgcacggatggtatggtgcgaattctattgcggtcggcacgctgggcgactgctgctgccgatcgcgacgccaacggcaagcttgactcggtagggcggcataccgggccataagccgacaccacacttgccacgattgatgatggcattacccgcatcctgccgacggcgccctggttgagctacgtcgcaaagtattactactagtattgaacttatctgagacgagtcggttaaatatgctgtaagatattttattagttagccaccatggtagctgacactactactatcacttcaactactacttactattagccgtaatatccagagaacgcatctcgctgtggagattgctgctcttctccgtagatcagtcaagttgccacacgcgtcaaacatgacctccataagctgttcttggcaatgatgtactagttactagtagacgttggtgaggcaagcctcgggcgtgagaggtcttttgcgggtagagctgggaatatgactcaaacaacagcgcctttcggctcggtctacctcatctggccgagcctgcgccaaactttcagcaaaattcagtgcacatcgccagcgatcacaaactcctgctactatcacgaactccggccgctagtgaatcgacgggagaagcagcctgcttcgcgtgtgcacgctgcttagcagcatgcagagatctttcaacgataagtactgtactactgtagtacatgtacccgagcgggaagttgaacttcaagcagatcttcaacggacgcggtaagatattgcgtaagtttcatcagctttaacgggtttcaaactgtttcggcagcattacccctagccttacccgaacctcccgcgatatgactggccaaaattgaaaaggtgcagttgagcgacccttcgactcgatcggggcattatgccccgaacgagggggtctaaacacaccgtgttttgagaagggcatcgtttggggcagaatgccccggttgcacacgaaagggttaatgttccccgaacttccttgaacatttatttttaaaatgttcccctaaggtccttggacatttattttttaaatgttcacccagaccgttggccatcctcaagtcttacctgctttatccatctaaccagctcattcctaaatcgcggcgatgacacccaagcgcaactcgatcagcaactggaagaagcaagaagtcatcaactggattaataccgtcggcgaaggagtgccatcgcgagcatcggcgcacttccgttcgttggggtgggacttcgacccggccgcggcggtggcgccaacgggaggagattttgactgcaccgccaacgcggagctggaggtcgtaagccagcactggggcaccttgaagatcttctactggaggcgatagtgctgcgccaactcaagaaggagaaggtgaaaaattagagtgtttaaagcagccgtttgctcatttgaatacattagcatggaataataagatacggccttggtggtctattttgttggtttgcacaccagggtaatgattaatagggatattcatatttcagcgtcagaggtggatagctgcacaggcacttaagctctacagtgaggtctctgacggtcaagttcgcctgttcgaagcttcaccacactggatcagcggattcatgaagcgctatgacttgtcgctgcgtcgcctacgaacctgacgacacttactgacgagctgcccgtcggccgagcggtctcgtacatgagataccttcgtgatcacaagggcgagttcaacttccgccacacggttctcatggaccgcagtgtatttcgaggatgcgcgagagcaaagtcagtgaattcgccgattatctgcgtgaggaactcccggaaggactcccacccgagcgagacattgagcactccgtgcaactgaagcaaggtgcagtcccgtcctccagacctccgtttcggcacgcacacgttgagaaagcagccttacaagtttttgttgacaagctttcgcagaagaagtggattgaacgcagctcgtccccgtgggtctccaacattttcgctgtacccaagcgcgatcccgtgactggcgagctgccgacgaagattcaatgggtgcggggtggtgatccttcaaaacccgtgcgctgggttattccattatcgctatgtgaactccgctacagacattccccgtattcccattccccggattgacgagatctttgaccgactggctggcgctcatgtgttcacgcttattgacttagcctccggatatcatcagatgagaatggcgtttgactcgcgtcaatacaccgcctttcgcgctgggtcagagatctaccagtggtgcgtggcccccatgggcctggcaggtatgccaggcacgtggtcgcgcttaatgcggcggatcttcgagaacaaagagctctctgcgttcgtagtcgtctacttggacgacatctgtgtgttctccaagaaccgagccgaacacttgcagcacttgcgtcgcgtattcgagattttgcggagcgagcaactttacgcaagacccagtaagtgccattttgctcagcctcagatccgtttcctcggacacatcgtcagtggggaaggagttcatgttgatccagacaagacagcggcgattgcgaactggactcgaccacaaaacgtgaaagacttacaacgattcctgggactcgctgggtactaccgacgatttgtgcaaaattacactgatctcgttctacctctctctgacttactgaagagcacgacggagtgggtgtggggctctgaacaagaattggccttcaacactatcaagacgacactcatctcggcaccaatcttgcgcttacccgacatgaccatgccattccaagtcacgtcggacgcttcgaagatgtgtgtgggtggtgttttcagccagcaagttgatggttttgatcacccagtctgtttctacagccgcaagttatcagacacgaagagcaagtgggccgcgcacgaacaggagctctacgcgataaaacactgtctagggcgatggcgattctatttgctcggaggccacttcgtggtccacaccgacaactctgcgtgccgttggttcttgcaccactccaacttgtctcgtaagatgactcgctggcttgaatttttcggccagtttgatttcgaacttgtgcacaagaagggaacgtcaaatgtcatcgccgatgctctctctcgaccaccagtatgcgtcacgacggttggttcgtttgtcttccgaacacgatttcctactcgagctgccaagcttttgatcgagggacccgaagcttttgtgccgtcgccgaacgcgtcactgatggacgtaacgtgcatcgggcacgcatcgcttttggtggtgggggaggatgagcagttcgtacgagccatcaaagcggcgtacgcgaaggacaagggctgggtttccatcatacaagggctgcaacgccaagagcaacgggtttcggagaagtacgagcttctagagggcgttcttgtggtgaaaagtccggatgctgtacgtgtgctccgtgttcctcaagtggatacgattttacttcgattgatgcacgactttcatgacgctgcagtagttgcccacccaggcgtggagcggacaatggtggcgatgcgtcagtatttctggtggccggcatgcgcgagcatattgcccagtatatttcgacttgcgaagcttgtgtgcgccataagtctggatctcgtcggcgcaaaggtcttctgcagtcgcttccggttcctgaacattgttggcagcacgtgactatggactttgtcacggcactgccactgagtgaggggtttaacgcaatctatgtggtcgtgtgtcggctgtcgaacagaccttgctacattccgactaccaaagatgttgacgccaagactacagctcgtttgtttttcgaccacgtgcgttactactctcttcctgagtccaccgttttcgacagagaccccaagtttacaagcgagttctggcgtgagttgatgacgatcatgcaggtgaagcaacgaatgactgtgtcgaagcgagttcaagccgacggacgtagcgaacggcagattagaacgtgggaggacagtctccggtgtgtcgtctttcattatggtgacaattgggtgaagatgctgccgactgaggaatacgcgcatgcgacgttggtgtcgacttcaactcgcatttccccgttcgaggtagattgtggacggaatcctcgctcaccgatagtcctggcaacttctggcaacctggcacagaacatgatccgatcccggcaagaagtgattgagttggctcagcgcaacatgcgaaagaacgtcaggcgtatactacaaccgtgggcgacagcaagtgcagttcgacgaaggtgatttggtgtacgtggatgctgggcctaagcagtgagcttggccaaccggattgcgaccccgagcgcaaccctgcctgccacaagctactgccgaagtggtacagcccgtttcctgtggtggaacgcatcggtgaaaatgcataccatgtcgctctgccatcgttaccttgcccgtggacgtcacgctacgttcaacgtggatcaacccaagctttctgtcgacgtctcagagatttttcgtggtcgccagatcacgaaaagcgctccttgcatgtatgacgaagatggcgaaagagtgtatgttattcgagcgctactggaccagcttcgccaaggtggacgcaagcagtacctctgctcatgggtggccctgcctgaaagcgagaactcctgggagttcgaagatgaaatcaactatgtcagccactgggatgcactgctgaaggacctcaagaataagcagcgccgtgctccgccgacccccagacgcagttaaacccggggaggatataatgttctcaagacccagttgctgcgctgagactgagactgagatggcatcctcaacttcaagtcgtgttcctgccatcggtgctggctgctgctaccgagcgtgcgcactgatctccatctgtatgtttacgagcggagctcttggccaagtttccgtttagctgttgctttgcttcgttagtttttgctcattctgtattttgctcaatacaactcagaaactccgaacacttcgtggtccaacattatagcctccatcccacaggcgcgtcgtacaccgtcaagccacatcgatcaagtcggtgtctcacttcgacccaccaacggaggtgttccatggagctgctatccgcgtagatccgcccaaacaccggatgacaccactgcttggtatgcaaagtgctgcagcagccggattctccatcttctcatacaagctcaccttgctcttctatcgccttttggacaattatccatatatatggataggaggtaatattttgacgaagcagcaggcattcgaaggtttgttgtgtggaatttatattgacagcgctgagatgcttgttgttggggcgaaaagccgtgaaggtaggcggctgttgccccgagaaagagggaacggtgtggagcgtgttgtaaacgcgctattttgcttgatgtttgcaggctccacgaagcctgcacaaaatatccaacgccaatatgattcaagctttcattcataaatcttcttgcgccagtcggccgctgccgatgctgcgtaccaagtcggttggtgcgagcagaagaacaccattattttgcaagaaaatcacttatggagttggatgcgctaaaacgtcaatctacaggccattgttctcctaagctaagatgggtagacgacgacttcgcttttgtctattgtcgtgttttaaccccccaacgaccacgctaacttaagttgttgtcagcagtcccagtacttgtaatgtatagctctggcaatgtgacttgctaacttgggcactttatccaatccgcgggtgatatttatgatgaagttgtaatgccaaatactacagtaagctatgcaacgtactggtacgcggggctctagtaatagtccgccttcgcgaaggtctagtagtattgtactgttcaccttcgattcagattggtcccttcacccaaagtgggtcccttttgcaattttcccaatttgaactggacgacgcgctggacagcacccacggctactcctactccctgtggcgaaagctcccgacgttcggagaggccgaggagttcctccacgccaatggggtcattgtcaaacgtctggcccagcgccataacggagagctgacgtggacggcctacgacgtcatggacccggacgtgaatgcgttcgtggcgttctgtgacggctgcgctctccgcaacggacgcgccgactgcacagcggcttacgatgcgctgttcccgcacaactaggcgtggaacgaggtgaaggttctgcgagacacctacgccacctcgaaccgggcggagtactccgctgctctggtggtcgtaaagcgagccgccatggtgtacccaggcagaagccggcccgtgatcatcttcacggacagcgagctgctaatcaacacgatggagaacttcatccacaagtggcgccgcaatggctgaatcaatgccaacggaggccccgtcaagaaccgcgacctcattcaggcaatcctgcgagtggctaacggccgcgtcatgatgttccgctacgtgcgggctcacacggggcgaaccgagtgggagtactcgtggaacgacaaggccgacagcatggcgcgcgaggctgcccgcgattgggacaacgggtactattgaggtgcgacaggatgcgtgtgcttcagcgacaagctccgtatgctcgtcttggagacgaataggttcaagctgacaaaaagctgttgctgtacatgtgcccgttattgacatgcgaggatgaatgttgctgcgtccaaatacacatcaaaagctctgtttggcttgatattcgcgtgaaaaactgcagaacagtcgatgttgaagcattcgacaccggatctgctggtggatcgtgcggtccgctccagtcaagagaatcaacaagtctgctgcgttgcctcgacgttggacgttggcgcaagtcctgcgacgaccaccgagtgctcgctgtccccatgtcacgcttgtgaccgccatcgtggccaaaccccatcgcaagatttccaatccgcctactgccggcgccctccacacatgtccaccgactcttgtgtcccaagcaagacagcgtttcaataccgcccgcgcgttggacatcgcaggccggtcgtgaacaacctttggggctttccggttctgactcagagcaaggcgctgagcgaggcatcgcaagttaactcttccagagccagagtgtttctgccgttcgacgtccattttccagctgcagcacggctgtgtgtgcctgcagcagccccagcatactcggcccaagtcaacacatcccgccgccgcgccatcagcttcccattcatcggctgtactccacggaagggccaggcttgcagacattgcagggccaggcttgcagacattgcagggccaaagtctgcgtttgtgctctccgtcgggcacatcaaaggatctgcctgtccggataaacgacacctcgacagctcgagcatcaacgacggacgaatgttctgctctcgccatcaaccgcgcgacccgctcgctcactgtgaagaattctagataggcagcactttgacagcgcaggatgaaagtgccagcaagcctcgtcgtggccgcgttggctgcgctgagcgtcaacgccgagtccaagggctcgtacagtttgacctccgggtcggcggactccgccgaacaaacgctccagacgacgtcgggctctggttactcggccgagtcttccgccgagacgagcgcttcgtccctcgaaggctgggatgttacttccacggagggatcggtcactgagtcctcggccgagacgagctcgtcctcgcttgggggcttggatgtcacctccaccgagggctccacgactgagtcttcggccgctaccagttcgtcttctcttgctggctcagaaacgaccgagggctcctcgagctactcgaccgagtcttcttcgagctacccaaccgagtcgtccgcggagaccagctccactggttcatcgcttgagacgagctcgaccggttcgtcgctcaagaccagttcgaccgagaccagtactacgggttcgactacggagacgggctcgagcaccgaggagagtacgtcggacggtaccttcacggacgagcagaagtcgatctggatcgagcgccacaactacttccgcatgacggccttgccatgggcagcaggaaacatgcagcgcatgaactgggacgacgacctcgcgaaggccgccgcctctgcggccgccagctgctcggcgtctacgactacgggcctcaacgtgttcgagtccacttccacggatccatcgacggtaatggaggaggcgatcaatgactgggtggtgaagccagcgctctcgaaaattggcatggtggttccgccctccaaggagggcgactctgtgggcgcgggactctacaactcgtactcgcaggtggtctgggcctcgacgactagcgtcggctgtgccatggccagttgctcgggtgggtcgatggtggcctgcgagtactcgcccgcaggaaacgacggcaagtccgcgtggtacgtccacgctgctcaggccacgcagtgtccgaccgggacgacggccagccacggcctgtgcattgtcgagggagacgcggccaatgacctcatcgcgccgatccccgacggtaagtggtcgttccaggtctacccgacgttcgtgtccgacattatggcgaccatcctggaggcggccagggcgagggatgctgcgggcagcgcgcccgcgatttctggtggatcggcagcgtaccagtcgtcgtcccccttcagctcggaggagtcgagctcggacactgagcagacctcgagctcgaccgagacttcttcaggatacacgaccgatttctccgctgaaacaggttactccggtctgggcagcggctgggacgtgacctctactgagggctctgccacggattcgtcggccgagacgggctcgtcttcgcttggcggctacggcgttagctctacctccggatcgtcgggctactcggagtcatctggggagacgacctcgtcctcgcttggtggctacgatgtcagctccacctctggatcggacgctacgacgcagtcttcttccagctcgctgactgagtcctctggccttggcggcggctgggatgtgacgtccacctcgggctcggctgccacgaccagctcggcttcgacggagggcgtcgcctccacctccggatcgaccatggagacgagctcctcttcgcttggcggctactcttcgaccgagagctcctcgagctcttcatcgtcggaggctacgagctccggttcatcgaccgagacgagcgaggacagcgagctgccaggtaaggtgaagcctagctcggcgagtggatcgtccttcaagaaccaggccgagtcgccgtcgacgtcgacgtccacggggtcgaccaagtccggcggagactcggccaagcaggagtcgaccgagcaggaggagtcgaccaagcaggagagcagcactcccacgtcggccagctcgggtgcgacgaccactgtgtcggccaagaacgcgtcgggtggcgtcaagtcgggaggatcgacgatgtctgccgctggcgtggccggcctcatcgtgctcggtgtcgtggccgtggctgccttcatggtgttcgtgagctaccgcaagaaccagcagcgccagcgcgacatcatgcgcgacggcggcatccatgtcatttaaatacaacgacaatgttgaactccatttgaagagagagaaggagcccgaaccttacgcaatcgatagcgtacgcagtgcctcgcccgcggtgaaagatagagtgagagaataaaggagaccgacctaggcggcgaggccggccaccggcaagaccagtcagtcgagcataaagtgaatccgaatccggttttgagttaccggtatctgatcctttggcttcgcagagcgcagagcaatgtcaggatcgagtgcagtgatgcaccgcatctgttgccgttgaagtccaccagctcaatgcggggaagcgggcagtggcactctcgacattgctgctgttcgctctgtcaactcggtgcaccgccaagttggcagttcggtgggatatccaaggccccatctaatgttagtcgctgcccacgcgatcgatcgtcacgtgagacgagagctcgattcaaagccaaagctgagcacgacggcccctccacgtcgttggctccgtgccgagagatccggtggcgactgaattgttcacgccgctccacctagatatcgactccaagtcttccgtcgcgcttggagtggccttcgaaagcggtggccaaattgtggcgggcggattccttgaaatggcccgtcgatatgaagttgcgtaaaagcctgcgccagctgggggctcgaacgccagatgtcgagtcgagaccaggtctccgttacgggactcccgtaacgggagtcagtgtgcccccgccgagcttctccaccgcttcacactcgatttcgaccgcgtcggactagcagagtacagcgaacacatacacacacacacacaggtatgaaggtggccgtggcgctcgccttcctggccgcggtggccaacgccgccagcttcagcgccgaggaccaggccatctggatcgaccgacacaactacttccgcaccacgggcctgccctgggccgcgggcgacatgcggcgcatcggatggagcgacgacctggccactagcgccgcgtccacagccgcacagtgctcgggtgcctccgcagcaggagtcaacgtgttccagtcgtcggccagcaactcgtcctccatcatcgacgaggccatccagcagtgggtcgtggagacgtccatgacgacgctcaagactctgccccagcctggcaccgtcggcgtggccgtcggaacgggcgtgtacaattcctactcgcaggtgctctgggactccacgaccagcgttggctgcgccacatcgagctgctccggtggagacatggtcgtctgcgagtactcgcccgcgggcaacgacccgtcctcgccctggtacgtgcacggcgagacggcgtccgactgtccgtcgggcaccacggcctcgcagggcctgtgcatcgtcgagggcgacgcggccaacgaccagatcgcccccatcccggcgggcaagcaaacttacgaggtgtacccggcctacgtggccaacatgcagacgctgctgattgaggtggctcgtgccattgccagcggatcgacgacgactacaggatcggccacccagtccgcccccgcagctacgacggccgcctcaacggacagcgcgattcaaacggccactactcctgccccggccacttcgtcgaactcgcaggcgtcttcctctggcgatgacggcgcggccaccaagaccggatcgaccaagacgaccaccacttcgtcctactcgtcgctggaatcgggatcgggatcggagccttcagcggccaccaagagcggcaagacgacggcgtcttctagcacgacggactcgtcgtcaggtacctcgaaggccacgaagagcggcaagtcgacgacaacaacgtcttcgtccacgacggattcgtccgaaaacgacactgccaccaagcagacctcgcagacgtcgaactcagaggcgtcctcttcggatgagtcggcacccggcacggttaaggcgagctcggacacgggatcgacgttcacgaaccaggcgccctcgacgacgacggaatcgtcgaccaagcagagcagcacggcgtcgtctacggagcagacttcaagcagcgcggcgaccgcccccagcacggccagcgccgagagcgcgagcagcatcaccaacaagtccagcacatctggcggcggtggcatctctgctgccggctttgccggtatgatcgtgctggccgtggtcggtgtcgccgcttttggcgtcgtcatgagctacaagaggaaccagcggcgccagcgcgagattatgcgcgacggcggtattcggatcatttaagctagaactgtggcgcttccacgatggagacacatgtgatgagtcccgagttagcactcgaagcgggtctcgatggcagcaatagcggcgagatcaaggacgctgaaagctgtagtcgaggcggtttggctttagtgcagtgcagtctagtgcagtcaatccagttttgttcgtatttgctagacgcgagtgttttgtaaagctggtaagctgcagcaactctctctacctacaagctttgggcaggggttaaaatacataatgtactcattgacctcaattgcctacaatttctactcaaacctcacgcatgccttcaacgagcgaggagaagaaggatgcacctgcagatcctcttgcgtatcgataccagtcaattcaacttgcgatgttgaagtcttcaccaaaggttatgtagaagttcatccgctcctacaccgctgtaaatactccatctctagccaattcagacagcctcgatttattggaactcggaatggcctgaccgtttttttttcgaggaacatgctttgcacaaagctgtttagcatgttccgcttgcttgtttatcaaagtgacattggactccaatttggagagacgatctcccccgccaagttgaagatgtgtccaaacacccaccgaagtgtcgaatctgaagatgcctagaatctaaagtgcgacgactgatgcatgtagcagtaccggtatccacatgtaacagcgaatttccactcccggtccgcttcagaccacgctttcgagagcggtgctcggtggacaagtgtgtccgctctgtaaggaccaactgagactttcgtgtcacctgttgcgttgttccccagtcgcacctgccccccatttggcttggcttgcggaacaagctgacccgaactcgcaacagcttgacagcgagcgacagtcacgcgatgcgagtttgcgcttgaattttcagacacagcgttgtgccgttcaccaagaacgctcgcgtcgaacccagggacaaaatacagtttggccaaccttccctctcgtgatgagatcgtctccacacgtggatctcctcgggaacaaggcccggtcgcacttgtaaaatgtcggactgaagccgtgcttgagcgccagacatttcggctgtggattgttgattcggttgccgcttgggctaagtcgcaggatttgaggtgccaacgaacggacaggaaaggaatcgaggaagtgctggctgccatgtggggccggatgtgcgacgccccgagaagaccacaaccaatttcctctcgctcagcacaccgcgtgctgtgctgcagctctcgatatttaacagcacccccatgaagttgtcaaacgggctcgcactctcggctgcggctgtcgcaagcgtcagcgccgagagcttcagcgaagcggaccaagccatttggatcgaccgccacaactacttccgcaccactggtctgccatggtcggccgctaacatgcgccgcatcggctgggacgccgatctggcgaccaaggcggccgccactgcgaaggcgtgctcggccaccacatcgacaggtgtgaacgccttccagtcgacggccaccagcgcgtcggacgctatcgaccaggccattcagcagtgggtcgtggagacggccgtgaccacgatcaagacgatggcccagcccggctccagcggtttggaggtgggcgtcggtttctacaactcgtactcgcaggtggtgtgggcgtccacgaccagcgtcggatgcgcgacggcgacctgctcgggaggggaactggtggtgtgcgagtactcgccggccggaaacgatggcaagtctccctggtacaagcacgcgtctcaagcgtccgagtgccccgacaacactgtcgcagctggaaacctctgcattgaggaaggcgccgacgccaacaaccagatcgcgccgattgccgcgggtgactacacgtaccaggtatacccgtcgttcgtggcggatatccagtccattctcattaactctgcccgcgatatcgccaacggctcagtccctccgtcgacggcgacaaaatcggacaactcttccactccggaagcgacgacagccacgcctcccacgaccaagggcgcgtcaaagatgtcgacgaagcagggaattccgtcgtcgtcatcctcctcctcctcttcctcgtcaacggtatcgcaggacgacagctacctccttcctggcaaagtgaagcctagctcggacaccggctccaccttccagaacgaggtcaagcctccggcagctcaggaatcggccaaaacggcactgaagtccacgacttcgagtgaagccacgaccaccaaggagcagaccgagtctctgacgacgagcactggagaaggaggcgcgaaggcacacggcatgtcaaccctcggtatggtcagtatgttcattctcggtattgcagcggtggctggcatcgtcatgttcgtccactaccgcgtgtccactcagcgccagaacgacgtcctcctcgacggtggcatccaaagataagctaagtagccgcaactttttcccccttacagtcagggactatgaattgtcctctctagcctagatttccgtctactcgagttccgttcgctttaatcgattgaggctttttaatcggtgtggccttgtcggacatggtgcgaaccacgttgaagctgttcgaggaaaacgcaaaccaagagcccattttagcattttaggtctcgtcgcgtcgtgggagctaccgtcttatttgtggcaccatgtcgtgcggcttcacgccggaccttgcgcgcatgctggagcaaatggccgtggagaaggagcgccatgccgccgaggcgcagcagactctggcagagacggagcagaatgtggcacgcgtcaagtcgaaaatggataaagtggtcgacaagcaagacgcccagaatggatacgactggacccggacgtacgagaaatgggaagcgtgggaagaccccgaggagctggcgaggcaggagcaggaggctcgggagcgcagcgagcgcgccgccaaggcgcagatgggctgcaaccacgaccactcggccgtgagtttagatgtggtaatatcttgataattagatgtggtactgaatattatttgtggtacaggagcaaaagctgatggacatgaccacgcaggagaagctgggggcctgtgacgagttccgggtgctgggcaacctcttcttcaagcacggacagtatcagagggctgcgttccactaccacaaggcgctggtgtacttcgagtacgtcttcacagacaccgaagaggaagaggctcaggcggacgcgttgaagttgaagctgctgctgaactttgccgcgtgccgactcaagacgatgcacctggacgacgctgtgcatcacgccaaccaggcgctggagattgacgcagacaatgtgaaggccttgtatcgtcgtgcacaggcatacagactcaaggacgacttcgacctcgcacagcaggacatcgctcgagccattgagctctcaaaggaagcgggcggtgcgcagtcggcggacgcgcagttggtgcaggagaagacgttgctgcaggccaaaatgctcgcgtacaagctgcggacgaagcaggtctcggctgcgatgttcggcaatggagacaagcccaagcctctaggggggcactacatctccggacttcgagcgccggatgccaacgcgatgtcgctcaacttgtcgaagggaccgatgtcagcttcagtgtcgtcgagtggcgatttcccgagcttggacacctggcagccctcgactcgaggcttgaaggagctgcagacgctgataacgcagctcgacggatagcttgggtggggagagagctgaaagaaaacgtaaagcgaattatattctataggttgtactatcgcaagtaagagaggctgactctgcggtcacacgttcaagggcttgatctagtcctcgaacttgaacgagttggaagccatgctgatggcgccacacatgtacgtcgagcgcttgagcttgttcttgcccttggtgaagtccttcccgcgcgtcttgagcagcttgttgttggccttgacaccgacgccgtcggcgccgaacgtgccttcgtagctgttgtcacgcagcgagtcgtccacgatcttctgcgaccagaactcgtcgtccacgcgctggaacggcgtgcccgccgacttggccttgacggccaccttctcgatcttcttgggctgccactccagcgcggccttggcggcctgctcgcgacgcgcagcctccttcttctgagcctcctcgtcctcagacgagtcggacgaatccgaagaggaagagtccgacgaagaagacgagtcgtccgaggaagagctgtccgagctggactcggcctccttcttggccttcttgctgctcttgccagcggcaggggtctcagccttgcgcttgttggtcttgggcttctccccctcttcctcgtcagaagagtcggaggaatccgacgagtccgagctggactcctccttcgcagcagccttcttcatgtccgcaggagtagccttcttggccggcttctcttcctcctcgtccgacgaatcgtccgagtccgacgagctgctctcctccttcttggcagcctccttcttcttgggcttctccttctcctcctcctccgagtcggacgagtccgagctagagctagagctggagctggactcctccttcttcttctcctccttcgccttctccttcgccttgggcgccaccttcttgggcttctcctcctccgactcgtcgtccgagtccgagtccgagtccgagctcgacgactcctgcttcttggccttggtcttctcctccttcttctcctcctccgaggacgaggaggaggacgaggacgaggactctcccacctcagcgggcttgctcttcttcttctccttctcctcctccttcttctcctcctcactgctgctggacgaggaagacgagggcgaggacgacgccgtgaccttcttggccttcttggtcttggccgcgtccaccacggaggcggccggcaccttggccttcttcatgctgcgctgcgtcaggtagaagctgtagacctcgagcaggtcgtgctcgctcttgaaggccttgggctccagcttggcctccttagccagcgcggccgccgccttcttcagccccgcgcccgtcagcagcgcgtgcaccagcgggaagacgtcgctcgccaccaccatcgctctggaagaattatggccgtccgtccgcccagcagcagcgtcacaccacacgacgtttgtcggccacgcaccagtggccaatcatgaaaacctttgaaatgacattcacgcattcgttctcacaggtacttgttgaaggcggcgaaaaatagacaagctttcgtcaaacaggactttttggccgtttcttactggatgtaccctcacttccgacatcggtttttctatcggatttaaagggggattgtatttgcttgggtttaagctgtattttggctcatagaggtcaagctcatcatggtcgcagatgcattgagaggcaagactacatgtatggatagcaccagcagtgcgagacgagtttagcgcacatcgtaccgcagattacctcgctccattgcattggcgttagctggtctttgtaggccttctccaaaagctccgtccgtgggcggctgcaggctcagcgcgccgaacacgactcagctccagccccagtagcatgggctaagatatagcgcaggcacttcgcgcttgagcgctccgtttcgctgtacgaggcactgtcggcgcacgtgctggacgcgtccacaggacgtacgtttcctgtgtggcgtcgagcagctttgtcctatccgcggcggcgctgctcttcgccttcgtcccgcgagaggtctaccaggagctggtggggtgccacacccagcagtagcagcagcagcagcagcagcgcagaattcttcttgcgtcatcgccgtgtcttcatcatgcttcttcacacttgcccccgatgctcctcactgctgcctgccaaaatgtgaaatgaatggttttggcgcgaaaacctcgtaacgatcataatatattagctaggtcttctgcaatcttataaatataaacacattaatctcagaagtaataaggagtattaggtgtcggaagtgagggtacctacagtattatcgactggaagaagaagatccgtcttctcctcctcctcttcccctttctcgagttgggatgaacggcgctcatgccactagcggcgagacattgcacctgtctcccacgcaggtccatgtttcgcctaggggtcacacaagcgcatatactacaagtagtacctcaggagttgtcggagcacgatatctcagctttcaagattggcgccacgtttgtcatggtctgtgcagtcggggcacttggatcaccgcgctcaaaacacaggctctgctcgttcgaaacgcggctgggagcatcgtcggcgcgtggattcctattgcgctgtgcacgctagggaatgttttctcgggaaagtcgtacatggagcagtcgcgaaacgagctgttggcggcgacgtgtgtgtgggcgacgttgacgttctgcttggccatttttggggtgtttgctgtcttgagcttgcggagtcttcggttcattgattcgcccgatacacgacctaccctgtggttttgtgtcaagaggctcggtcctgttacgtccgtctacttatccgccacgatcagcgtcgttctctcggccacctgcgtcatcacgtacttaacttcgatcgtgcctggtttgttcaagtacacgatcgaatgctacgtgaccaccttttcattgatggggtacgttactggaatgtcacgcacaatggttaaaatctaccatgaagaaacttgccagggtcgtgaaaagcttgcaaagaaggagaaagcagcgcgggaaccgaaaggatcgacacaacgcgagcccacgactcgattacggcgcgcatcatcgagttatttgcttcgttatcggacccctacattctggcggacatatgcgaaagccgtctccgtgaccctgccggtctttctcgcaaacatttttgttcacgtcctcagtcgacaacgcctcgtcgaccgagatggagttgtgctcacgggcttcgtggtcgcaagcatagtatttaaacttgccgttcaagaaattgtcaagctttatattttcagaagacgcgtgcgcagtgcgcgagtgatgtgtgtccttgtggggatcccaaccgtcatcattgatacccaaacgaggataattctgatagggaagaacaacacgaacactgcggcaatgggcgcgctcggcatggctgtgatcgagattttcttacgcgctggcaagaccatgcgcgtgatgtgggaggttcgacaccatgaacacgctctggagcggcaaaataatgtctcttggtacccaaccaaatctcgaattcttcctaccacagttggtcacccactgccgtctcaggaaggtgacttggattcctggcgccgcaggcttcaaacgttccacatggctgagatcaatgccgatatgtacgcagaatacatttccatcggctgctccgcgtcgattctgttcttttacgggagtcatccgcactattcgttgctacggcagtcaggaactgccaggacgacggctgcagatctactggagtggcgcttgagccagatgcgcatcctgggggtgcagatcgctatggaggtcgtcgtggatttcgcttcgatcctgttgagaacgtgcttggggttgagttcgaccgcgcaacgaaattgggatccttcctcgcttctgtgttcatgatcgctgcagtgataaatagcaccataacgcttggctacttcttgagctagaccagagctgcgtgtaaggctagaatgtagtttgacagctcgctggttcgtcatcacaaatctgttcagctgcagtaccggttagttaataagtttgcttagtggcaacacttcccagttcgatcaccgtctaacacgaacttcggtctgaggaagtaaaataacactactttctcttgtgttcgaccaaatcgcagcctcatcaaagttacccaaatgccgaggaagatagagcttgttgaaaggctatactaaatacatgtagaatttctacatgtagcaacatcaattctacagtaaaattgatgttgctacaaaaggaatgtttgctgtggtttaagatgcgtctgcgtccaagtatttttactttttctatgtccactaatagcgaaaatagccaactccactctaggttttgagaatgaaccgcactcgcgtacacgtatttcccgaagaagcgacagaagtggttcagaaaccagaagagaatgacgcaaaccgtcgttcacgagctgctacgtccgagtcctcacctttcgcctcactagtgtggctcgatgccggtcgtcgcttgtgtagatctaccacgtggatcactgctctgaaaatacagacgctagtggttcgaaatgcagccgtcagcattgcgagtgcgtggatttcgacagctctctgtgctttgggggatgttttctcgggcaaatggtacacggatcagtcccgaaacgagctcatcgtatccaattccgtgtggggaattgctctcttctgtactatggagtttgcatcatttctagtcgtggttacgacatttcggttcgtggagacgcgaccaaccgcgtggagttgcttcaagcgccttatacgcgagagcttgcgctactttgtcggagccattgccgtcgctctcgcatttagttacttatttgcccacctgacttcgggttcgcctgcattgttcaagtacaagatggactgttacatgaacatactggctggaatcgggtattttactggcatctctagagtggtgaaacacatctaccttgaagaaacccaacatggacgcgacaaacttcgcttaaagcagcacaagtcacagaagtctacgccattaccacgatccgctgcaccaattggacggcgccaatcattctggaaagcttacatcagagctcttcctgtagcgttgccgtcatttctcgcgtgcatgttcgtccaagtattgagccagcagcgtctcgtggatagtgaccaagctgtgctcactggcttcaccgtcgctagcgtcgtcttcaaactggtcgtccaagagtttatcaaacactacattttcagaacgcgggtgcgtagcactcggatcatgtgcttcatcgtggggattcctaccgtgctaatcgatacccagacgcgaatgatcctgctaggaaccaacagtcggaaaatcgcagctatgggaacgattggtatggcgctactggagattgcgcttcgaatggggaaggctgcgctggtcatgtgggaaatccaccagcgcgaatctgcggctctacgcaggaccgagtctgcttcaagtttccgctcaatcatcggcgtgtttcgccggtccaagacgagcatcaccccggggtctacgatagcagaaagtgagtttaagcagtggcgtcgtcaagtgcagcagttttatatggcggagctgaatgcagatatgtacgctgaatacgtttcgatcggctgctcggcgtcaatatgtttcttttacggaaaccacgcacattacgggttgctgaggcgctcagacaggtcagaaccaatcgagaactggcgtgtggagcagttgagtattctcgcgctgcaggtcggagtggaggtggtcgtggattatgtgtcgatcgtgttggagatggtggttggcatcgaatttgaccaagtgaagaagctcagcttattcctcggtgggctctttacggggactgcggttctgaataccgttctctcggttcaggtcttcttgagctaatactgagtagccaacctgacggcgcgtgaggtagagtaaattaactgtagactgaattgacggcttatgctaagcttacgcatcattttggtcttgaaaaaaaaagtctgaagtatttataagatgacacgatagcgatgacacgtcaacagcgtaaagagctacaaacgatcaactattttcgtttttagatgcaccgaaagtgagtggaagcggagcacgtcatcaccgctatgtatcgcccccacatagaccgaggtaaaagcgtggaagagctccagctcccagtcgagaccagcaatgagcggcagtccagaatccgagttcaagcgtggacaaaccccactgacctgtccaatactggttcttctcacaatgaaggagggcgccaaattctagttcggcttcgcagtcgatcgacttggattactgcgctgaagatgcaagctctggtcgtgagaaatgcggccgaaagtattgcgtgcgcttggatcccgaatgcattgtacgcactggggaatgttttctctggaaaatggtacatcgatcagtcgcggaacgagctgcttgttgcaaacacggtgtacgcagcgcttggcttctgcctggtcgttttcacgtcgtttctgcctatgatgatgtcgctaaagtttgtcgaaatgcctggaagtgtggttttgtatgaagcgactggtgggagccactcgcgtgtacttcgcagccacgatgctcgtaagttttggttttagctgtctcatcgcgcagttggattcgatagtgcctgaggttttcagtttaaaatcgagtgctacgcggataatctctttctgctcggatattttacgggaatctccggcgccgtgaagaaaatctactacgaagagacccaagagggacgcgatcgactgcagcaaaagcaggagaagccacgaagatccaagatagtccctgccgaaatcgccgcagctcaacagtcttcccctccccgccaacgcgcacctcctacgttttggcgagcctatctcagaggactaccgacaacgtcggtaccgtttgtagctgcgttattcgttcacatattaagccagcaacgcatcgttgaccgagggaacactgtgcttactggcttcgtaatcgccggggttgtcttcaaactcatccaggagctcgccaagcactacattttcaaaaaacgagtacgcagcgcccgcgtcatgtgcgttctcgtgggcattccgaccgtcctgatcgacacccagaccagaatcattttactaggcacgaacaacacgaaaacggcgacaaacgggcgcaatcggcatgacgatgattgagatcacgttgagagcgactaaggccgtactggtgatgtgggagattcggcgtcgtaaagtcggccttgaacgcacaacaggctctgtgctactgcgacgagcgattttggagaagttcagccgccctacaaaggttgaaccaaagtcgtcaaaagcgtctcgaccgtcaaaccctcgagggttgaatgagttcgaagtgtggcgccgtcaggtgcagacttttcacacctcggagctcaacgcagacatgtacgccgagtacatttccatcggttgttcagcgtcaattctcttcttttatggcaaccacccgcactacacgctgctcaggacgacagtgaacaccgacacgtccggcgtcgacatgatggcgtggagagtgagccagccagaaatgatgggcttgcagataggggtcgaagtggtcgtggactacatctcgattgtgctggagatggtcattgggatcgagttcgaccacgtaaaaaatctgggctcgtttctcggcgccttgttgatgattaccgctgtcatgaatatcacaatatcgatcggctattacttgagttgaggggccagagtatataaaatctagagaaaatatacaacctacggaactcgtgtcatcactccactatctaaacttgggaaacttcagctttgcgtgatcttggtcttcgtgttgccggccgctgtggtcctcgtggtcgatatctattgataggagggacgtgacgtaaaaagaagcacgaacgctgagttgctcacgcattgtcgatgccaatcaagcgcgtgaaggtggtccctcgcgcgaacatgcggtcgattcggcgaagcgatgcgcactaccgacctcccaatcactcctcgcgctctctccgcgacacgacctggttcagcggttttgttgctacacgccgccgttcttccgctctcccccagagctggcagcgcattgtccctggcacttctgtgtggatcacagccctgaagatgcaagccgtggtggtacgcaacgctgccgagagcatcgcttgtgcatggattcccaacgcctgctacgctcttggggacgttttctcggggaaatggtacacggagcagtcccgaagccaattgatcatcgccaactcggtgtgggctgccatcacctactgtggagttgtgttcatctcgttcatccccgtgatgctttcattccgcttcatgaagacaccggatcgccggccaacggtgtggttctgtctgcttcgactcgctcgagcggttgctgcctacttcatcgtagcgactctcatcgtctttgggtttagttgcctcacagcctacctggctgccattaagccagggacactgaagtacaagctcgactgctatttcatcaatttctcgctagcggggtacttcacggggattactcgtgtagtgaagcagatttactatgacgagacagttcaggggcgtgagaggctccaacaaaagcagcaaaaagcgcggaaatctagaattgtgccccccaacgcgtcaggagcggtgacaccggcacgacgcgggtctttcaaggccccagcgcgctacacgccgcctaaattctggctcgcgtacctccgtaacatgtccgtcgcgttcgtacccctgctcgccagcgtgttcgtccacatcttaagtcagcttcacattgtcgaccggggcaacaccgtcctcaccatctttgttgtatcgggcgtggcctttaagctcgccgtgcaagcattacgtcttcaagaagcgcgttcgaagtgcacgcgtgatgtgcattctagtaggaatccccactgtgctgatcgatacgcagatgcgaattattgtgctggggaccaatagcaccaataccgcagctttgggagcgatcggcatggccctgtttgagatcagcttgagagctggcaaggcggtgctggtcacgtgggagattcggcatcgcaaagcagtggtcgatcgcagaatcgccgccgctgcgcagagactggggacggttgaagcgtttgagcaccaccgcagtacaagtgtggtccaccagcctcaagcgccgaaaacttcttccaaaacgtcctcccgcccttcgatgacggtcggaatgaacgactttgaggtgtggcggcgacaagtgcaagccttccacacggccgagctcaacgctgatatgtacgcagagtacatttcgatcgggtgttcagcgtctattctcttctttcacggcaaccgcccacactacgcgtcactaagacaggctgcagcaagtactgaggcgacgacgatggataacatggcgtggcgcgtgagtcagttgaagatgctgggcttccagatcggcatcgaaatcatcgtggactacatttcgacggtattggagatggtaatcggaattgagttcgaccacgtgaagaagctcaactcgtttctggctgcgatgttcattatcacggccgtgatgaacattaacatctcggtctgcatttacctacgctgatcatataagcaatgaaaggccctagatatacagtactaaactatgaatatccgtcgtccccagtattcgaagaatggcttcgtttttatgtatttgttggcaagaagagaggttatttttggtagttttgtgagtccacgagtgcaaagtagctgagtcacgggaatcgccatgaatgttgagtatgaaccgagttcacgttcatgacgaggacgcttgtcgccaacccagcgcgcgagtcatacaaggtcctctaactgtcgtccaggcttggtcagcctcacctaatcctccagcaaaacctattactacgagtcaagcgtggagaggattgtgcaatggacttccggcgagttctgtgtggtatcgtgcactgaatacgctcggtctggtcctgcggaacgctacggagagtgtggcgtgtgcgtggataccgaacgcgttctactctcttggcaatattttctcggggaatggtactccaagcaatcccgtcgtgagctgatcgtggcaaactccgtctgggacggcatcacattttgcgctgttatcctcctttcgtttcttccgatcatgctttcgttccgctacattgtcgcaccggatcatcggccaacgctgggtttcagtatcaagaaacttgctagagctacggcgggacattttgctgtagcgatttcagtaatgttctccttcagctatttcttcgcttatctggttgagattgaacccagagtcgttcgctacaaactcgactgctacgtggatatcatagcgctattgggatatttcactggaacatcgcgagcagtgaaaaggatttattacgaagaaacgtgtcagggtcgagatcgactcaagcagcaagccgaaggaaagtctcgaagaatgtcaagttctcgccgacgggataccccgaaattctggaaagcttacctgaaaaatctgccaatgatatccgctcctatcgttgcgtctctcttcgttcacgtcctgagccgacagcggatcgttgatagcgacaccaccgtactcacttgcttcgttgtcggggccatcgtcttcaaactggcaatacaggaggctgcaaaacattacgttctcaagcaacgcgtacgcagtgtccgtacgatgtgcgtactcgtgggcataccgacagtgttgattgatacgcagacgcgcatcgtcattctagggaccaacagcactacaacggcgtcattgggcgcccttgggatggctttggtcgagattagtttacgcgccgtcaaagctgtggtagtcatgtggagtattcgaccacgcaaagccagagttctacctgaagagctgagtgcagtacctcaggctgtgcctcacgaagccggtcgactcaaaattagaagagctagctctgtattgcgctcgatggttcgaaagtcttcggggttggccgtgacaaaagatgatttcgagctgtggagtcggcaaattcacgccttccacactgctgagctcaacgcggacatgtatgcggaatacatcgcgatcggctgctccgcttcaatcctcttcttctgcggcaaccacccgtgctattcgctcctgcgacagtctcacgaatctgaggaagtagaagacgtagcatcacgacggacgagccagttgtatatggtgcttttccaggttgtggtcgagttcgtcgtcgactacgtgtcgctagtgatcgaaatgatggtagggattgagttcacgcacatcaagaagctcgggtcgttcctggctggctggcttgttcatgatcaccgctgccatgaacatcaacatctcgaccaatatatacctgagttgagccgctgtaacctcgacttggggaaggaagtgctcgtattatgagcactaatacgagttaaattccagtgcgccaatctctgcaatgaaatattttaccggcaaggtcccccctgttgcgaatgctacgaaccgttgacgacaaacttaggatgcgataagcagaggtgtttaccgaggacatgacatcttgctattgatagcagctttgaatcgaagtcgtcacactcacgcacatcggcttctgctatgtgctgacgatgaatcgcgtagcgccaaaccacgggcttcccactgtccacagaccgtcccgtagacaaagcacagctcgttcgctgttcacgtccttctggcttggcccgaggaaggcgtcggtattccagacttggagcaagattctgtatcgttcgccggaggtctcgccatggcgcagtgctctgcggatacaagctgtggtgctacgaaatgcggcaacgagcatcgcctgcgcgtgcacccccaacgccttctacgcgatcggacctggatcagtcccgcttcgagctgattgtggcgaattccgtgtgggcctcggtggcgttttgtactgtcgtgttcttgtcgttcctccccctcatgctctcagtgcgatttctcgactcgcccgactgtccgccgtcgatctggttttgtatcaggaggttggcgcgagctacgtttgtatattttatgggagcagtagtcgcgatgtacgggtttggctaccttgctgcttatttatcctaccctacgtccacccgagttcgttcagatacaaaatcgagagctatgcggataacttatcgctgctgggacgggaaggcgcggtttgtcacctggaatatcgcccgtcgagagctgagaacacaagtcaacgtcgtcgcggcagagttccctgtctgagctggtgattcttggcattgaagctcttctggccccaccaactagtccttcagtatctgccatgcatgtagagtttgcggtgtggcgtcgacaagtccaggccttccacacggcggagttgaatgcggatatgtacgccgagtacatcgctatcggctgctccgtgtctatcgtcttcttttatgggaatcaccaacactattcgcttctaagacaatcagatcatgcgatgagcaacgttgatgaggccgcgtggcgtgtgagtcagctgtacatgctggcatttcaagtcggactggaggttctagtcgactacgtgtccattgtactcgagatgaaggccggcatcgagttcgaccacgtcaaaaacctcggagcctttctagcggcgttgttcatggtgacagcagtgatgaatatcacgatatccataggcgtttacctcagctgaagctgctagtcgcagcgttggtacttcagcacgtgtactatacgcaaaactggtttcgccatgaataaatggacacagttctaccattctcgcctcgttcgagccactcctcgtgtagatgacgtctgcatttgcatcattgctccacaggacatgcataaacctctaggccccggagagagtatagtaacccctccattccaactgaattgctttcgaacaccaatttgaccgattcctagtagtagtagaagaacagtactggaaccctttgcagtggtgttcttcgcaatgagtgtgaaggtctctgtgagcgtctaattagttagagttagcatcgacattgcccagttagctcaattttcacatcctacagtaaaacttagcacacgtagacttcgctattgttagaaagtcgagtgtttttgtttgcccgcacttgcaccgaatgccgcgcgttgacgccgccccatgcagcgatggacaacgcgcagcgaccacagcagccacatcgtctcgaccccaacattctgcagaggctacgaggataaatccggccacaccatttgattttaatccgatcgcaagtcgatcaactagacggcggcagctctttggtaccctttgtgaacgctccgcctggataaaagctctacgcacacagaccacagtggtgagaaacgccacggggagtatgatatgcgcgtggatcgccaacgcttgttactcgcttgggaatattttctcggggaaaccttcagtggatcagaccagacgtgaactagtcgttgcgaacgccgtgtgggccaccatcaccttttgtgttgtcatgctgatcgctcggatcccattgatgctaccgcttcgatttctcgacgcccccgaccgccccccgacagtgtggctctgcctcaggaaactcatccgtggaactgccttttattttatcgttaccatgacggtcatgtattcttgcagcagtctcattggatacttaacaactatcaggcccagcatattcagatacaagttggactgctacgtcggaactctatctacgcatgggtttttcactggaattactctagctgcgaagagaatttattatcgagacacgtgtcaaggccgagagcatctcctgcgagcagaacaagcaacctatggcgctaataagagaaaccctggtggcaatacccgagttcgaccggccaccgcgttatctttccgagcggcatactgcaaaaaatcgttcatgttttggcaagcttacattagggagtttcctaaatccgcccctgctgcgttagccggagcttttgttcacgttctcagccagcagcatatcatggaaagcagtggcatcgtgctctcctctttcgtcgcagccagcgttgtattcaagctatttatccaggagagcaccaagcactacatcatcaagaaacggattcgcagtgtgaggttcatgtgtgctgctgttgcgctgccgaccgtcctaattgacacccagactcgcatcatccttctcggaacgatgaactcaaagttcgtggcggttggtaccatcggaatggcgtttgtggagatcttactacgcgtaggaaaggcctacctcactatgcgtaccattcacaacagagaagcccaggtgcccgttcatcgacaatccgtcgcggctacgatccgacagcaccaacccacgacaagtcttgatgcaaacgcgccgtctcctgctcgcattgagtttgaactctggcgacgacgcgtgcacgcctaccacatcgctgagatcaacgctgacacgtacgccgagtatatcgcgatcgggtgttccgcttcgattttgtttttcttcggagaccacccttactattcgctgctgaggcatgcagacaacgacgagcacaaggatcagcggtggaccaacctgaagatgctgcttttccaggcgattattgaactggtcgtggattttgtgtctacggtgctggagatgatggctggaatcgagttcgccattatcaaggacctcggcgcctttttcgctgtcttgttcgcgatcaccgcagtattaaacgttaacatttcgatggggacgtacctgtcttgagataatacttcaagcaagcgtaaatgcctgtaaaaccaaagattttatttcacattatttttttcagatactattgatagctgatgcctacaactttttagcaccactttcagggctgcattacgacggcattgtcgatgcctcgcgttggagtgggtccaccgaacgattatggccctcgtatcgcgtttgaaccagtgggtcctacaatggttggggagaatgccgcagtcggcactgacaagtcgaaatatcccgacgttgtacctgttaaaggtcggcaattcatccgccacctccgtaaacgaaccaaatggaccagcgcgctcaagatgcaaacgaccgtgattcggaatgcggctggaagtgtggcctgtgcgtggcttgtcaccacgtgctactcacttgggaatattttctctggaaaaccttctcgtgaccagtccagacgcgagttaattgtcgccaactcggcatgggcgtcggttgcgtttagcaccgtcgtggtattagctcaaattccactgctcctgtcgttccgatttatcgatgaacctgatcgccgaccagctctgtccttttgtctaaagaagctatttcgcgtagcagctttttatttcttcgtgatgtttgcaattatggtgggctggagcacttttgttgggtacctaacgtcaattaagccgacactcttcaagtacaagctggatggccacgtcaatactttatgtacgcacggattttttgcggggattactcttgaaacgaagaaaatttactatcaggagacttgtcaagggcgagatcagctcacgaaaacgtcgcgccagcagccgcgaccaagtgccggcccccgtagttctccttcacctggtactattaaagctccaccccgcaagaaaacattttcgtactggagaacgtacattaaggagttccccaagtcgatccctgccgcagtaacaggttcattcgtgcaaatactcagccagcaacgaatcatggatcgtagcgggtccaccatcgccagcttcgttatagctagtatcctgctcaaactcgcgatccagacgttgatcaagcatcaaattcttaagaagcgcatacgcagcatccgggtcatgtgtgctgccgtgtcattgcccactttgctgatcgacacacagacacggataattctcctagggactcaaagtccccagttcttcacactcggaacactagcgctcgccttagtggaaatttcgctgcgtactgggaaagctcactacgtcatgcgggtcattcgaaatcgccaagttaatcttcccggtcggaggaagtcaacttcaccctcgttgcagcaagggtccactaaaacaattgacgccagctcaccttcaccagctactctggagtttgaactgtggcgcagcagcttcctcgcctatcacgtggcggagatcaacgcagatacttacgccgagtatattgcgatggtttgttctgctgccattctggttttctttggtgatcacccgcactatacgctcttgagaaagctcgatagtagcagtgacctacgctccagccagctaaagatgttgttattccaaattgcagttgaagttgtggttgactttgtggcaactgcgctggagatgatggcgggcatcgagttcagcgtcaacaagagtgtcggtgctttcctcaccgtcttcttggccgctatcgccgtgctgaatatcatcatttcgctcggtatttacctattttaaagcaaatgaacctctacaacccgtaactttttttcgaatggaagggtcttcagcattaacttgcaatttttaagcagggctttaaaaaccatgagcgtactccacctttttccaagacctctcgccacgccgcttggtgaagatcctcgccttcatcccagccccctttaggcagcacccagcccctcttctgtgcgttcgaactcgaaatgagacgaacatcgccgcctccttcattggccgaccttgagaccacagtgcatgtcagcagacaactgccatctttgttgactcgttgcttggcgcgacggacgtgcgacctcaagacagacgcgaccatcatgtcgtctgtgatctccatctccttgcgcataccagcaggggtcttcttggacaccgcaccgtgtcgatgttggctatcatctccctcgcctcgagctgcgcagccgccttgatcgacacgatctcggaccaaaccagcatttccaggctcaacgcagacgtcgctctgcgtggagatcacgaggtcaagcggactctgcgttggcaaaatgacgatgacgatgaagaccgaggtttggaaaaagttagcggataaagtcgatgacacagtcgcgaggttcatctacaagcctctgaggctgccaagttccttgaatgtggcgccgctgatcaagccggaagaagccgcagcgaaagcgaaagaagccatgatgacgtatccgaagggcttgagcagcgggacgatgaggcaattggagaaagtggaagagcaaagggcgtacgatgtgcttaaaatcgagctcaaccccaatgccatcagagatgacccagagtaatcaaagatggctttgttcgctaaataagccgtgcattttgttatgtgatacttggtatcactccttcgaggttgccgccgatagtcaggagtgtatccgtagtctacaacttgtttaggtattaaatgggtataattcgggatagttcgttagttacggtccgtaagatacggatcgtaatttacggtattgcacggggtacaggttactccaccgggtacgaataaccgatacagtataaaccggtattcactgtacccctgttcggtaccataccgaatcatttccgcatcttcgagagagtccaaaggcggccttcccctcgtactcggcgaccatggcgatggcgatcggcatgaagagcatcacgggcgacgcgcacttcttcgaggagagcatgaacctggaccgcatccgcaagctgctggacaacaagctgggcgtggcgggccacggggagaagctggaggccatgaaggcgctgctggccagcatctccaagggcgaggacgtgtccatgttcttcgcggacgtggtcaagaacgtgatcgtggccagcgtcgaggtcaagaagctcgtgtacatgtacctcgtgcactacgcggacgccaactcgcagtgccgcgagctcgcgctgctcagcatcaacagcttccagaaggacctggcggaccagaaccagctcatccgggcgctcgcccttcgggtcatgacgtccatccgcgtgcgcgacatcctgcagatccagctcatcgccatccgcaagtgcgcggcggacgagtcggcctacgtgcgcaagtgcgcgaccaacgccatctccaaggtcttcgtggtggacccggagcagaaggacgtgctggccgagatcatcggcacgctgctcaacgactcgagcacgatggtgctgggcagcgccgtgcaggcacttaacgaggtgtgccccgaccggctggacctgctgcaccgccccttccggaagctctgccacttgctggccgacatcgacgagtgggggcagacggtgacgctcaacgtgctcatccggtactgcagggagcagttccaggcccccgaggtcatgaaggagggcaagaagggcaaggagatgttccccaagcggaaggccaggaggggcttctactcggacgacgagggcagcggctccgagagcgacgagaagacggccttcaacaagagtcagggtgggggcttctccggtcagagccccttcatgctgggaggaggaggcgcggtgaggggcgaggcgctgccttccatcggctcggtgttccgcagcgacgcgctggccagcggcatcggaggaggagaggagctggacgaagaccaccgactgctgctgcgctcgtccatcccgctgctcaagtcgaggaacagcgccgtcgtgctggccgtcgccacgctgcactactactgcggcacgcacagcatggccacgtccacgctcatcggcaagtcgctggtgcgcatcatgcgcaaccagcgcgagatccagtacgttgtgctgtcggtcatctcgtccatggccacgtcgcgcccggacatgttccgccccttcctgcaggagttcttcgtgcgcgcgacggacccggcgtacgcacgcaagctcaagctcgagatcctgacgtccctggtcacggacgaaaacgtgagcatcatcttgagggagtttcaggcgtacgtgcgccacgtggacaagtccttcgtgaccatgacggtgcgtgctcttggacgggtcgcggacgcgatgccctcggtggctgagcgctgcctgagcggcctgatgcgtctcgtgcgctcgtccaacgagcaggtcgtggccgagagcgtcgtcgtgatccgccagttgctccagcagcaggccatcaagaaggaccgcctcgtggtagtgcgatctctggctgcgatgatggtgactggccgtgtcaccagcccgtcagcgcgcgcctcaatcgtatggatgcttggcgagttcaacgatgacggcaacggaacgacctgcgctgccgaatcgctgcgtctgcttgtgaaggacttctccgatgaatcgaccgaggtgcgtctgcagatcctgaacctggcggtgaagcttggacttcgtgagccgcagaagcgcacgatccagctgctgctccagtacgtgatcgagctgtgcaagttcgacattgactacgatgtgcgtgatcgcgctcgtctggtgcgcgccgcgctgtctggggacgctagcgtcgtgaacccccacaagttgttcgcgagcaagaagcctgcgccgctgattggatacgacgatgagaccaagacacggttcacgcttggcaccatgtctaacgttgtgcaccacagtgttcccggatacctgacattgcccgagtggcgatcaaccaaaccggaccgctcgctacgcgacgaatcatctttcgtcgagacgaaccgtggcggttcttcgcgtcatgctcctaagactaccaagaagaaggagggcggggcgaagggattctacagtgacgagagctcaggatcggaatcttccgggtccgaatctgagtccgagtctgaatcggaatctggcagcggctctgagtacgattcggatagcggaagcagctccggctccgagtcggcttcatccaactccggatctgagagcgaggcttcgtcttctgaagaaagcgagtccgaggaatcgtcagaggaggaagaccgcccgcgtcgacgagagaaggggaaaaccaagtcgccacagaaacagtctcagccgaagaagacaaagcctgctaatgctttcgacccgctcgacctgttgggttcacccactgtaaacccggctgctgctcctccgatgcaagcgtttgcgcccatggcccctgcgacttccaacctgctgggtgacttgatgagtctgagtgtgtcgtcttcgactacgccacctccgcgacacgagcttctttcctctctggctggcaacggtctggacgtccactacgccttccttcgtcagccgtccacacactctccggcaatgaacgttatccagttgtggttcgccaataactccaatgagcccatttcgcgcgtccagatcgtcggcaagaaccctcagcaggtggttccgttccccgagcttcccgtgctgttccctggtggctctacttctatggcacaacttcatgtggacttcctgggtcgtctcgacaacgttccccttgagatcgtgacgagcgaggacaagtacgaggtggatctagctcctgtggtcggggagctcttcttgccgcagcagatgagtctggaggaattcgagcgtcgcatctcgatgacggactcgacgtctctccacacgagcgagttcacgctgcctgttccagttcagatgaactcggtcgtgcaggccgtgctcaaggactgcaatgtggctcaagtatacgagatcaacaacatgaacggcgtcgtgggcaagtgcaagttggcaggccgattccgcagtggaaacgccagtgctgagaacgtccttatcggtctggaggttcagctgcagactggtaagggacggctgctcgtggtcatgcgcgactctgttctcgctcagagacttacgacgggaattaagcgtgccatgccactccaaggttaagtaagactggggttgagtgctccctccggggatctagcacaaagtttggaataaactcggcatgttttcgatagattttgtacatttaggtgttcagtcaaggaacatcatggcagatatgataatattgatgatcgcagtcgtcccgaacagcgcggcaaggaacgagccgagccctttgatccggtcgaactcgatgcctgccgtgatctccagcacgatggacgtgtagtccacgacaacctcgaccacaacctgcaacaggagcatgttgagctggtttgatctccttgctgcctcgtcagacgccgacatcgacgcgttcaacggcctcagcagcgagtagtacgggtggttgctgtagaagaagaggatcgaggctgagcagccgatggcgatgtactcagcgtacatgtcggcgttgagctcggctgtgtggtacgcttgtcgctgatgtctccacagctcgaagccgatctgcttgcaagcgaccgaagacaatcgtctgtcatcagctcccattgaaggtctgatggacgcgagagagcggctcgcacgcccaggacgtttgttgttagtctggaacggcagctttggcggctcttccaggtaatcttgccgacgacggatgctgtacgtgacgatgaaggctttgacgacgcggacacaaatctcgaggacggccatggcgaacgtcccagccgcagccatcccagtgttcttcatgcccagcagaacgatccgcgcttgtgtatcgatcagcactgtgggcactgctacaaggatgcacatgacgcggatgctgcggattcgcttcttgattaccacgtgcttggcgccttcctgcaaggcgagcttggctactgtactgagagccatgaaacacccgacgatcgaggagttctgctccgctatccgcatctggctcaagagctgcacgtacgctcctgcaaggaccacgggcaagcacaaactggagtttttcacgtatccgcaccaaaagcttggtgatacgtaacttgggccgatgtcgagcgctgttggatagactctggcgttcatattgagccccacggtgatcactggcatcttgcgcttctgctggcgtctatcgagtcgttccttcccctcgcgcgtctccatgaagtaaattcgtcgagtggtcattatgacgctggtgttgatgatctggttgcacaaacaatgcagtaaaactcggctttgaatctggaggcgccctccctttgagacagctgagccactagagtgcccattccaaacattagcagcagcgtgaggatgatgcaagggccagagcctcggagcagctttgtggcacagatgagaacgctcggacgctgcttgggatggccgatgaagcgctgggtcagcagaataatggccacggcgtacagaactccacaccaaacaacgttcgcgatgatgagctcgtatcgggattggagccgggaaggtttgagcgagaagacatttccagcgaagtagcacgcgttcacgagccacgcacacgcgatactgccgacggcattccgcaccaccatttgctgcactctcaaggcttggacccaagtcccgcgctggacgaggtccttcagagcgcgatgccatagcgaaatacgtgaagctcttcgagaattgacaggtatcaagggcccaagctgggccaaagaccgactgaaacgcattgtcctctagccacgcgagcgcacaaatctctgggaaaccgtgcagccaacaaagaccaagctgctcgtatctcacgagggcgaagacgaccagcgcgggggggtcatacgttattccggggaatctaccgccaccgatcgggaccatatccgaccggatttgaccactactcaccttttttggatccgaatgattcccccggtatccgtttgagtagagcaagcacgccctaaagaagaaacgcgctcacccagcacgaagtcgaagaggttggaaggcctcgcggacggccacctcgaggccacgctacagctgtctatcctacggatacgactgccgagagcccggcgttctatcgcggcgacgtcactgtggagcgctgcgtccggcatgagtgggtctctgtctctggctagcggtgcatcatcgtcctcgtcgagcgggtctgtgcgtctatcgacgggtgcggcggccgagtaggcaacatcaagctgtccgtgggcagtggcgatacggctaagggcggcggcgtgcgctggtttgaatacgacgagcaccgctgcgggcggcgtgggcggcgacgtggccgtgtccagcggcgcgagcaatagcttcacgagcggcaatgtgctgatgcacactccggatggcggcgtgggcgcaaacagcacggccgcttcgtcgggcctgatcaaactgacgacgggctgggctcggcgggcgacttgcggtaacggcggatccgtcttgctcagcgtgggcacgggcagcagcggtgctggcgaggctatctcgctgcggtttggcggcacacaggctggaacaggagcggctcttgcagcgcaggtgacgtgtctgactgcgggggcgaaagtggtccgccgtcttcggtttgagtgctgacgagcagcaacaagtaaacgttgcgatggtcgctgcctagagacaagtgaccaacctgatcaggaagaacctcgtcatcagatgccgcaagcccgtgtcctccgcgtttgagctgctgctgccgccctcgctcgtgttcatcgccaacctggactcgatcttcggtaccgggggcaactacagcagctcgtccgaggcggccacgggcaccattatgtacacgggactggactcgccggcgtacacggactacggagcgctgagtaccaacatgccgacgttctacagcagcggccagagcgtgaggcaattcctgctgatcagctacatcaagttcgtgtccacgaccacgacggccacgatgatcgagaagaaccggagacctaacagctcgtccacgtagggcttgatgctaccctagcgctcgatggcgagcaacacaacgggcatgacatttagcgttcagcgttctgcaagggctgcgctgcgttcgagattgctaaggacaccaagctgtggatgaaaggccagctcatgaatgcgagattggttcagctcgcaagaaggaaaacataatgtatgtttgatggattgaacatgtgcgatgtaatgatcttatctaatcgatcctatctgactgtcttggttgctctttcgttttgtgcagtaaagacgcagtgctcgagtcaatggcagacctccttccagtgctcgttctcgctgaaagcggacgagctgtcggacgagttgagtttgtccggctccgtggaccgcgagctgccggtcttctagtacttgccgtgcgtcgtctgcagctgcggggtcatcttctgcgtgagttcgacctccttgttgatcgcgtcgcaggcgcatcagtgctccgagctcctggctggtcctcagcagctccgccaactgcttcttcaacttggcgttctcctctcgcatgcgcgcgagctcgtcgtcttgctcagctttctccatcttgaacttggagaactcctcgcccacgcggttgatctctctctccttctcgatcttctcgatgcacagtttggagaagatctgacgagccaagcggccacgctagatgcggatagctgctgcctccgcctcctgtctgccctccttcatcacggcgaactgcttccgctcctggtttttcgctccaccttgtccaggtccttgtagccgtgctctgcgctgcactgctccacctgccggcgctcaggttgcgccccttcgtcacgtcaaagtgcttcagcaccgcctcggtgtctccagctcatagcgaacgtctgtcacggcttgaactccctttgaacgaccttgtactcaattctaaactgacttataaacttataaacaaacatgcggcggagtgtcggagttcggagctcggtgtcggatatgtcggggcctgtcggccccaacatatcgtatgaacccattatctacctcctggcgggtttacgaggctagaataggccgcggaagctaacttcgtcgtccatgcaagttcgtcacgacacctgggaaaactcctaaagatgtagatttatgcattactacttctgcttgagcagccacttgtgttgtcgacggcagctcggtatggtggcagaacttgcaactccatcgtatttcttcagcaaaaggtgcttcgtgcttcacccaatcgtccatagatttttttagtttcacgtaaaaccagaaagcggtgattgcatgtgcatttcaaagtccagtcgttgcgaagtcgatgagagcgatgcaacctgcgttgcacatcactttgctgccttacaaggacagagtttgagcaagttattgtcgcgtgtcaatacgtcgtactatgactggtaattatgcttggccgactttggggagttatagcatgacaatgttgagcatcaattcactgcaaacggcgcaaacggtgcaaattatgctgaattgcaagtctgctcaggcttcgtcttcttggcactcaggaaagagcctcgcccattacttcagaaaaattcctccagcagtcacgatgcaaattgtgctacaagttgtagcacttgcttgtatcaatgctccattaaataaatttcaatttcaaagcattttcacgcgggaaatgaaaaatcatgtcgataaaaaactacttcgaggtatccttttattaattaataatcttgctttaatagctttcaatagccagccagtcagcgaagaagatcatgccgccgatcaacatgaccagcgtggcccttgccgctctccctcacgtgctctcaatgatctcatcgttccttgacgctacaggcgagatgactctgtcggaagcctgcatggaccacatttgggcaagtagctgcgtcacggcggccgagcggacccccggctggtcgcgcttcaactggctgcgctcggactcgatcgacgcccagtggcaattcgagttgtcaatggataaagcagccgcatacgagtattgggacgtcgttcggtggctccttaaccacttccaggacttccgcgtaacgcaggtcgctgtggaggaagtcattcgggccaatcagtttgagctgttgaaagagatgctgggccgcaaccgaatcgattccgaaggcgagaggatcacgctaggacgcggaatcaattggacgtgtgaagacatgcaagactgtgatgaggaggtcgcccactggctgtttgccaccacccctatcgctagcgtcgctggccaactgagctcgttggtgtctttttgtcagcgtgaagcggatatcacgcgagcggagtggttcatcaagagaggctgcccgtacagggcagcagatgcggtgtgtagtgacccagacgtaacttgctggatgtttgcaagaggtggagtgggggagggcgacgtcgccagagcgttgcagtcaatggcaggagctggtcgcctgggcatagtacagtggattctgagcaaataccctccgagcagcacccggggctggcaacaatgcggggcagatgcgttttggtctgcgtgtcagtcgaattgtttgcctgttgtgaaatatttcttggaacatggaccgagtcaaccgtgcttggacctatacccgaatgccatgtctgaagctgctgtccgagggcatctagacttggcaaactaccttcactcacaaggtttcactgcaatggatggttccatatttcgtcgtgcagcagtagccgggtgcctggaggttgttcagtggctttgctgtcagtttggagcgagtttctcgctattagatagttagggggggggaaacggaaatgctcatgatgagagtggcgacagccctggatttcgcagctgaacgtggccacctcgacattgtccagtatctccacaagttgtccgttgaagctggtccagacaaaagacgtgtttggcagcgatcaacctcgcggcggctggacacctcgacgtagttcaatgattaattacacttcaacaggtccgaaggacgttcgtcggacgccatggacctggcagcaggaaaaggctacctggagattgtcaagtggctacacgaacatcgtacggagggctgtaacagtagcgcgatggactcagctgcatcagatgggaatcttgaagtcgtgaagtttctgcatcaaaatcgttcggagggctgcacatccgccgcaatggaaaatgttgtccagaatggtcatcttcatgtcgtccaatggctctatgacaactggagtgaagatgtctcggccgaaatcctggacattgccgctgtctctggtcacctaaacgttgtaaaatggctgtacaagaacggcgtacgctgcgacgaacgtaggacatcccgaagtgacccagtggctgctgtctcgaggtccccactgcccagagcccgacttggaaacgatcaaaatggccctgtggaaggagcttctcgacttcatccactggatgctgaagcgcttccccgcgaagatcgctacgactgaagtgatggaaatggctgctcgcgagaacaagttcgaggtggtgctgttcttgcactcacaaggcaccgagcggttgagggaggacacgatcgaaagtcttatcggcaggaggctccagtgtggctgtcattgccgtgcatctctaaatatatataatatatattcacccgacaatgcacgtaagagaaaataaaaacagaaagtatccaggatgatgccaacgtacgtggcgagttgctgttctcacacgtcacagataatcatctccgatctatgtgccgcacacattcctcctcatacaaattccaagtgagcaacccccgtcagtatccaagaagcgacaagcaacaagaagcggaaagctcatttattttcccccttcacactgctctaaggccccccacagacgcacacgccccacgatgctgctgaaccacctcatgttctggatgatgatgacggagggcgccatctgcctggtgctgagcctcccgttcggccagtgggtctcgcacgccgtcatctcgttcctgatgaagcacctgggcggcaaggactcgccggccaacatggtggccacggtggtgctggccattgtgtctttgctcttcatctgtgcgtcagctccctcctcgtggtggaatcacctctgtagacacagtacaagtggagatatcgaccattgctctctaactgttaactgtttttttcttaatgtttttttattattcctacagcggacgtgacgaccgtttacaagcaccactcgtcggacgaggtgctgagcgatggcatgcgcatccgcctgctcacggcgcagcgcgacatgtacatcacgggcttctgcctgttcctgttcctgctgctgcgcctcgtgtacatcgcgctggccacgaacctgcggctggagaagagtttgggcgccatgaagaagcaggccgagggcgccgcggccggctacaagtcgctcctggccgagaacgagagcttcaagcagcagacggccaagctgcaccagctgctggaggccgaggaggacgacggcgacaagaagaagaagctcgacgtgctggccaagctcgtgcaggagaacgccgacctggaggccaaggtcaaggcctcggccgagcagctcaagaaggccgagggccaggtggcggccgtgaccaagcaggccgagggacagagctcggccttcatgaagctcatggacgagaagagcgaggcggacaagcagctcgagacggccaaggcccaggacgaagagctcaagcggcagcgcgagttgatcgccaagctcacggaggagcgcgactcgctcaagacgcagatccaggactacgacttcatgttcgctgaggccaagaagaaggccgagtaagctgactgactgacaagaacaggcgggcgcagagttatctccacgatgcacgtgcacgccaacacaagacgaaaaaaatatggttgtttttccctgtgtatactagttgttcgtatgtgtgtgcagttgatctccctgggttttaactgttgtggtgcaggtactgcaagcgttcttgaataatctgcagtctcgagctcgcagtgctggaggttgacgatgatactgacgacgctggagacgtaggcgctagaggactgggtgggccgtgagggctcggtgtcaggttcagcggagcaggacgaatactcccactgaatcgacgctgcgtgacggcgctctggacgtgaatccgcatggcccacactttctccgctgcatcatcgggattctccacctcttcgtcggtatcttgttgccgctgttgcttcttcgatgcgtcatcgccgccagtgtagcgcgtgaacactcggacgtgcagcgctcggttttgcttcaggatggggattaacagcaggcggaaagcgtctttcacctcgggcgtcatatcctccaactcaagcgtgcagccttcaggaggcagctccagcacacggtttgatgacgcacccctcagtggtggaaccccagggtaagcctccattcgcgccagccaccgtctcactccaagctgctttttccgatcacgggtccaattctgcaggatgagcgccgtttcccgggaggttatggtgaaggtggggatcggcatggacccattcgcactatctccagcgtcacactcgtaccattgcgccaacgccatcagaacacgccttcgcaacgtaatcacagtcttctgcttcacaggagagtcctctagcttggtctgtaccttcagcatcactgcaaagcgcagcaagctcaacgcgaccgtcaaaatcggcaactgtcccttctcacttgctgcttggccttgaagacgctcacacaaagcagggagaatgtcggcgtgagtctcaaacaggctcagtgcatcactcacagcacccaacagcgtctgcaagtgcgtcaagaagccatccatctcgctgatccccgaccgcaaaagtgcccaagcttttgaaggaggcagcgcctggatttccttgtcgctgagaccgtgaaacgccttcagtgtgtacggagcattggccggttcaacggtgggcgaaagcttgtgatcttctgcagctaggagctgcgtttccagggactcgcactgatcctggactcgacttagatactgcaagtgcttctgcgttttctcctccatcgccgactggcaactgagaaattcttctgtcgtgagcttcgaggcctgacgagcttcacggacttcctgctgaagtgcctttttctccattgccagggctcgggcatttttctcgagttcagccgccgattttgaagcctcggcaagtttggctttgtagtttgtagcttcacccagtcgattggactccgattccgctagctggccttggaccatcgcaaggttactttcgagatcgcgccgagcccggacatgttggtcgtttgcctgctgcatagcctccagagtgcccgacaacttcgcgatattctcttcgtgttcaattgccgcttgagaaagcttcgcttcagcagcaagaagttgtgatctcacgtcctccaacgtatgttcccggtcacgtagcgtatcagctgagttcgcgagggcttcctcctggtcacgaacagtctgcaaagcctgcgcaagctccgattcacgctgcttgtcgccagcaattactttcgattttgtatccgccagctccgcacgaacctcaaccagatgatcttcagcgtcgcgcagtgctgcagcatgttcctctttcatctccacgagttttgctgcgtcggtttccgcttcaacagctcgctgagcctcagaatcttcgagccgtttctgcagttccgcgcactgactttccaggccttggatcctcgtggaatactgctcttgagtcacttcttgatcatgcagcgtcttctcctttccactcctcagttccagctccaaagctgcacacttcttctgcaattcggtcacctgctgttcgtacttctcacacagctccttctccttcagctcaccctcccgtcgaaccctttggctcaactcccccaccaacgcgtctatcttctcttcatgctccaactgcagcttcaactcgcgttcttcaacttcactctctagcttcgccctctcctcctccttctcctgcaactgctgcttcaagatgctgcccgtctgcgcgtgagttgccaatttggcctccaccttctccttctcctcctgcagcttgctcttctcatccttcagaatctccacctgggtctctagaaattcatagttctccttggccgcctgctgctccagcaccgcatctgccactttgctcttctctgtctgcagcgcgtggtgcgcgtcttcaagcctcgtctctagctcccctttctgcagagcgaacgctgcctgctgggccaacatggtctgcgtctgctgctgcaccgtcgccgtgaggctgtggagcttgttgaggagcgccaacttctccactccgtcttcttctccttcttcatgatcttcttcttcttcttcttcttctcgctgattatcttcaatttccggactcttctccttcttttgacaattattctgcccaaatttctgctccatttcacctaaccgcgcttcatacttggccgccattcgccataattgggaattgaagtcttcctgctgcatgtgctgcgcctcgcgagccgcgcggctctgcgctgcgctgggcggcggtccgtgtgtctgcaggtgcgtgagcgaggcctccagcgcgcgcttgtccctgcgcgtcttcaccaggtccgcgcgcagcagcttcagcgccgcgtaggcgtcgcgcagatctttctccattttggcgcagaactgataatgacggcaatgaaagatgggagggttcacttgaaattggtatgggtgatttagggggacaactttactgtacggtattttcgtataactacatgctcgcttctcactgggacgaatggcagccaccttggtgtccacgggatagtggctaggctagcccttccaatagaggcgaagctaacactggacattggcttactgtaggacgctggtatctaatacatgtagatagcatctatcgacgcgtgtgtggagtattcttcctgacgacagcgatgccggcggcgacggctgcagcgcagccgttgcaacaaggactgcgtcaacgttgtcacttcataaactacgtatgtgtgccgcatcaacagcggcacttcataatcaagtgccattgattggagctggagggtattgggagcacgccctccatgaagcggaccgataaactgcttgcctaaataaactcactcaccagcggaaagaagtcttacttcgcaagctactttgcagcacacaaacgtcataaaaacatcgaattgttttgttggcatgcgatttacattcatcggcgacaaactctattatttgtagtgtgtctcagttctggcagcagcaagatagcgctctcagaaaaccctccaaatttctcccaatcagagacgaaaagaactgagaccccctttgtagttcggcagcagcaacatgcctcatgcgtggtctttgctaattaagcctattgctcaactacagtagtgcgcccatgcatataccgaatttgagatttcctaaagcagagctttctcctaaatgacacactcacataaccaatcatgttgagccgttcatacagctcgctgatcgagatctcctacctaatgagtcttggtcgcgaatgtacaggtaatggtacatcaatagacacgaacagatcagcagcatacacaaatcgacaatcctatccaaaaccccacgcatggtacaccaatgtacagattactggcggctagtagacataagggcccttctcgcattccgagtgatgcaggcgcgttatacaagaaccgcactgctgcctgtctgctccagtcatcgtttcagctaacactttcgggtgacaccaagcatcaggcggtctctcaagctagccggctttgccgaccaccgctggagtggactaaactaagagcgtgctgtaatgaagatgaatacgtgaaatttcgctgggaagctttttgttgttcggtggtgcgtgccaaaaaggatcgtccgtgcatcatctgccctggggaacacgatatggttgagcgccgactgcgctgtcgtagcgaaacctgtgagagcagcacgggaccgataaagtgcccgacgtgctggaaagttcatcactgtccagtagtttcgaagtgagtggatcattctaagcaacggagcagctcattttcgtggagagatcgaacgcgcggtaccgcctacgcctaaggttacagaagagatgaaagaatacattcatcgcatggacgagaacgctgtaccgcctcgtctcatctggagcaacttactgcgcgcacccgatgtcccgaagccaatgctgggctacccgtcctacacccaagttaagcgcagtgtgaaacatatacgatggctacaaactattacgatggctacaaactattacggggttcgagaacgccacctacccgatgtgttttttcacgtgctttacaacgtgcctaagcgcatcctgcatttaccaaataccgttcgtggagtagtttaccgtggcattcttgacatgcactacgcaactagtcaagtccagttgatgacggtgtgggctcgaatggctacagagtggaaatgtgatagtcgactgtggagttttgttgaatattgcgattctcagtggcttagtagccgattttggcggtggcagatttaccattctcctggtggattcgtaacgactaacaatccatgtgaagttttcaacgctagtatcaagcgtttcacgctccgcaaggttatggatatgagacgcctcatccaaaaacttctgactatcgcggaagacacctcgatctgtattcaacctagtagtacgtccgcgcgcccacacccacctcaagaggctaaaacgcttgcgaacttccaagtttcatcgcagcgggttgctgttttaatacgggagagcattctgtcgtacgagtgcagtacttaggcgacgggataacggacgatgcagacatccaagaagtttcaagcattggagactcacaggccactgcaacccagtctaatggggtacttctgtttgaaggttgtttgactgacgctgaaaaaaggtcggcggccacgttttaccgttccactgtgaagtggtcagttcggtgggctcaccacctgggtatgccgccgagtggatgggtagtgcgcattaacacgtttgagtgtatgtgcccctacctcacaaaatttttatcgtgcgcccacgtgatctgcggccgggtcgcgttcggtttaagtgttccgggcgtcggcggtttgcaccttaagttcaagaaccgacggattcgccgtactggccatcgtgacaccaaagtcaaggctcctgtgctggttcatagtgcgcccttgacttcggttgaaccggcagctcccaacacataacttgtgatcgagccaaaaaccggctcggcggaacaattggaacttatcagctcagctgtacaggattttctgcacgataatacggtcgacttctatgaattggatttctcgacgtcaacggacgcaagcatttgtgatgactacaatcaattcgacgccagctggagctaactactcagtgcagatatgagtggaacaggaatgcgtccacacaacacaggattctatttttccgttttagcctcgtcaagccccacgccgccattctcacagcgcgacgttccgccgaatggggcaacttctgtcttgccacaagtgtatccaccagcccaagaacaaattcctatccaccgcccacggggccggccccctcttgcatcgcatgccttgtacattccgtacctgctgcgataacgtctaggttactggaactagcgcaagtaacgaacaaaaatacacgtttcattttacgtatttagaatattcaacgcttaccatactgtaatctctaaattgcactagaccaggtagatatcacgtatatcactccttcgtgcacttgaaaacaatagctagaagtgcaaaaccctcattcacctgttagagtacttcagagctgtgctttgtttacccccttctcttaatttggtgtgtttcaggaatgtgttggaacgcaaactagtaacccatagacttctgagcttgcacgatgattaacttgcgttcctgactactccccattcgcgttatagacatctgagcacaacaaggaggaaaattctggtttattagcacggggtttacatgaacttacatcaactttgatacttttccgctctataatttgctctcgcgcgccaaatattgtccgtaatgtccatgtctttactggagctcactcagcgtgctcagcattacatgatatgatagtagggtatgcaatatataagcataggagcacaacaagaggggcattgcatcaaatctgacacatgtcccactgtaatttgctcccgcgcgtacaatattatcagtaacgtggatgattttactggaacacactcagcatgctcaccgttatgtgtcatgatagtaaggtttacctctacatcagtcggagagtcacaacaacggtaaatctactaacctgctagctatcgattctaaaaaaaggggaagataatttgctccccacccatcaataatgcttggcttcggttttaagttgctccgtggaacttgtgacagtaagcgctacaagtattgataacgatatggtgcgggcggcagctttaaataagaataacaacgtagaaagagatcctactcttcaacataatccatatcgatttgcatgtgacggtctgataacgtatcgaaaaaagttgcagttaaagattttttcggtacagcattatgttgcaagcctttattgtgtatggcgctttcgcttacggttctccttctttttaatcccagcagtggtcgcattgcgtctagctgcgaatttgggatcctcctctaccttagctataaacttgctcttctcagcctcgaagctgttaggacgccatactctaccttccatggcgcaaaacgctggcagcactctttcccatgctggcctagtccccttggccacagcaacagcggcctgcatagcataacggtgtgcaaacagtcgatcttgcttcaaaattacgacattacctgcgattgcgacccacttctcttcgtccagcgtcttggcttcataggcgagagtaacagtgtgaaagaccaaatggttgacgaacacgacgcccccaggactcggttcatcgagttctcggttttccccacgcggatggatcgagcgtccttcatcgcgcggaaaaacacccaaatcttgaatgctttttgctgacaaggaggcaagtacgctaccgttctgccgtggtccacgtgcatgggtgtctctcggcaaccaacttgtagccaaatctcatgcggaaatacgtgcgcctccgaagacgacattcgaatcttagagtagtagcctggtatgcttacaacgcactgatcattgggaccctcggcatcttcgtcgatggcagcttgggtggcgtccttaatgatttccacaatgcttgtgcccttgttcagcttcaactcggcccgcacatggctgcttgacactggaaattgatccgccctacgatatcctgccacagcgttgcttgcgcccctaaagacaagcactgcagctttagcagcaattgccacatccatggagaatgaggagtcaacgtagaggtcacggaactcgtgcagcttcttcaaaacttcttccctgttaatggttttaccacaataatcagcttcttgaactaattgttttagcttcgcaatgaacggtccatcggccggcatcgtttctccaacccgccgctgctgacctgctgtagttagtcgtgctgcatactcttggtctcggcggggcgctggagctgctgttggcgctgctggttgctgctcgtgtgacggtgcgttggctaggaccagtaattttattgttagtgtggaccacagtgaacaaaagtatgcatcaggctgcgtctctttttttctgtctattggtggcccacgtgcgtgtatattgctgacctaactggtgtatattgacgacctttactcctacctaatgcacctaaacagtgctgaaaaagccagtcatttagcaaagagcgagcaggatgccacgatcccccggccagcgccaaggcagggcgcggacttccggcacggggaaggcgcttgccgaagaagatcctgactgggagttactgtttcagctggttacagatttcagcatgcagcgtcgtgtactggccgatgcttcggttgatgaccctgctcgcgatattgacacgctggctgccgacgagagagaagcttagataatttcatgaatacacaaattcatgaatacacctacatgtattgccacttgcaaatactttgtcctctaaaataatatgagtggacacgagataggcgagggctgttttagctttgtgctttggtggaggccgcttttaggcccagaagctcggtttgaccagtctagaatggcatttctgcgtttccaagccgcagaaaagcgttttggtcgggagcacagagcctcaagcttggatgttagaccgtactggcgatacgtgtaaatcagacctaggtctgaattaagagctgactggattaaaatcgagattattaacgagataataagcgtgcgttagccaaaatatctgcaaacggcaatacgtcgttgcatttgcattaaacagtttttttctgcgcgcttaccctgtgtatctcgtgtacacctagggtatcacgtaggaaatctcaaattcggtatacctaccatatttagttataatgggggtggtacaaaatgggaatgagtactttcctacctcgatcatcaatcacttcatacaaacttttcataaagacttcgcccgtctccaaaatggctcctttttcggcaaccccattataactaaacccccacaacaactaaataaatacggtaaatgttataggtgccctgcagcttgtccgacatgtacatcgttcatcatccgtacgttttggagttggctcgcctgttctcatcaatgccgtcgatcgtagcaattccttactccgttttctggtgtgtacagtatcgggtcgtaaacacatgcgtaaacacatgcgtaatgcgatacggcgcggtgtctcagaaccacccgccgattttgtactgacagcgtaccattgacctgtagagcccacccagatcataattaatcttccaataagcaagcgccctgcaattccaagtccaacgatgggcctccacaagggcttcttcgtcgcagttgctctcctcgctctcctcattgttgccgctccagctgatgcgatcacagatgagtctcagccccgcgatgcaaccatcgtcgatgccccactcactggcaggggtgccaatgctcggtatttacggactagcacatcgatcatcaaggcccccgacgcccagctaccgagtacaaaggctgcgatcgcatcgtctgtcaccaaggaagaagaggaacgcaagatctcgaccggtctcagcaagctcaggcagaagctgagcaagcgttttcacgatatcccggactggctgcttcagctgcaggctttcctgtccgtcggactacaccacctaacgtaagtttcacaggcgttctggctggaaatcccgcaatcgtgccaatacgggaaagcactcgtatttgtatccataagcatattcctgactcgatcagtatctgagccgctaaaacaacttcatagcaccacatttctatagaattgtaaaccctgagagcaaagaatcgaaccttcatttagcctttctctttgaaaaaagcgccggagtctgtgtggctcgtgctgggacactggaacccactagaacaggctgatgagcataaggttcacgccactcagtatgaccgagatatccggtaaacccacttgcagctttttcaaaaccctttttaaggcgctcggggaccctttcggcctctggagcagcttgccaagaccgctcgatatccctccctcttcgtcgacgcctagcgaagtgtgcatcagctggctgacggatgccttggtcgagtcgtcactccggagttgtctcgcatcgggactaagtaagcgaggcgcagcttcaattccggtcgcaccatggggtagggccttcttagaaatcgccagagtaacgtcgcagcaaaaggccagacaccttgctgaatgaacactgtagggtaggaattaaaccagttcgcaggtaacaaaccgctcactagcacagcagacaagtctagcataggtaggtataagttataggacgattatagcgggactcctttccaaaaaagcatgatgaccttcatttagccttctgttctggtgcgtcggtgaatctgctcgcaaccagcgctttgtccaagcccagatttattgtggctggtactggaacactgtggtctcgcacgcctcaactatattatgctgaagagcacatggttcaagtgatcaagcatggccgaagtatccggtaaacgctctttcagctttttgaggagcttgacgagagcgcttggagattttttcagcttctgggcgagtttgctgaggccgcttccgagcgctctttcttcgacagcgcctgatgaagtgtccattacttggctgctggatgccttgattaagtcgtgagtcctcagccgtctcgcctcgggaacgccgccacgaatgtggagacttgcggtggcttctgaggacgcatcgtcgattacagccttcttgattgcgagcgctggagtagcgtagttgacaagagtgagggtgatcaaagcgatgaggaaggctgtgctgactcccatcgttaagattgaaattgtccagcggattgagagagcgaagtccgatcacaaactgattcaggtataaggtggtgaactgttgtaaaacgaagaatgaatagatctagactacttacggcgccctggaaaaaggagtttcgtctttctccgcctcgcacctcttctggagctcctcagtcgttgcgaaactacctgtttccaacagatcgccttcagtgtggggaaacatgtagtgaattcttagcgggagtggagtggcggcgccccaactcgaaatccgccgcgaatttccgcaagaagtacgtaatgctggccacgcgtcgctaggcgtcctccccgcctagcacattagtcttgagagctcggcggatccttcagccgtgagtactggatattccttgaagcaattcgacaaccatcgaccgagaaccttgatggcaagtctatcggcccccgcattgaacaataccgtcgcacctccaattcggatcgagtgagtggaataccgctcgggattgagaccttcgattcttgcagcgtccttgataattgccgcaatttctcgagcgctaataccacctaattggcctgttgtcaaggcgggttgatccagatgagttccaaacactgctgctgccttgagtatccatcgggccgctcgaacgggacaaaggacgctatcgcccgacttctggtggtagcgaagctcttccctgccgaactgattattctttgcaccacacagacgaatacccacccgagtcgctttgcgcggggtcgcgcgttgattctgattgtccaagaagcaaatatctccaagtcgtaatatatagtcgtggtgacgccggccaataaacaggtattctgatctccgaagtaaaaagaagtatgcaagcagcattccaccccacgcgagcatgttgcgaggttgctggaagtcaagcattgtactcgcacgccgtagaagcttgggtgacagcggatgctgcttggaatcggggttcgtgaacctccggatgccgcggagtagcaacgcgtggctcgcgttcacacccgggtcatacccgagattgtagcggtgataccaccgaacagcacacaatttggcgcagatagttgagtatgaatttccttggccggccatattcatcccaaagcgccacagatacaccgtgaatgaaccgagctgcgctgcatttttgtccagatcatgctccgatagccagatggggtagttcaaccaacggcaccaggttgtccattgaccccatgcgctcttgtagtgagctcggcttgactcggccaacgccccagcgcgtagtatcgctcccaaagagtcgagaacgtcctgtagccgggtggcactctcacctgggtccatgcagacgacatattagtaaaaaggtcagctttcgtcggagactgccacacccgagacccagtgtctgccattatgttctccacgccggggatatgcgaggccgtcacgaaaaagttgaaacgaatttccatcaaacttaacaggcgaagcagtatctgcgccgtggcattcctgctcgcccttcgattcgtccacgatacagccgactgattgtctatgcggagtcgaatgtggtgctgacggtcgggctcaacacaagcccagcgttctccccagaccacacaagaaaataccgcactcatcaactcgcgtaggtttattccatagtcgccagagccgtcatgcttgaaggcttcaatctgcagcagctcttccgagctaaagggaacttggataaattctcgtcgtgagggccagagtgcgcacaaacccaagtcacttgcatccataacaatacagaagtcgggtggttgtgtcatcgtaaatcgtcctaggggtatccagtttagtgttgcagttcgcaggattagccgaaaccagtgtaggtcgtcccgcgctccttcattgacggcgacactcgagaaacgatgagccgagcgggctaaagctgccaaacgctgaaagaacgtagctgcggagcgaatacacgttaccacgtggcgcaaactccccagcagcttctcgagcttcgtccgcgtggtgtgtgtggatgccagcagcgcgtcgactcgtgtgatggccttcgtaactttgtcctggggcatcgtcacatacaacgcagatgtatcccataccagtccgagtgctttacaacgagttgatcacgatgtaaacttatcttcattcaccgcctcgggacccagcacggcaatcatcgctccacgtaatgccagatctgcttcctccaacctcgaacctacatccggctcaatcgaattgtgatcatcgcaccatgttttcgcgtcgaagtacgtattggctggtcccggttggttagaccagcgaggtttggaagtagagtacaggtgggtaattgccgctcctgccagccaatagtgcattggcgaaagtttccagccaaacgggcaagagaggtcaatcacaagtaccccgagctccggtatcacccctgcgaatcatccgacatgatcagcatgtatagggatattacgaaatgcgccgttaacatcaccagacatcattttggtccgtcccggaaattcagcattgacatcgaggatacgacgggccagagttggcgggccatcgtattgaactggtcgagatcctgagtattctcattgacggacgctcccttggggtatgacagatcgtgcatcttcggaaagaggcagccctcctttctctgtcgcgccaaaggggctgcatgtgatcccggacaatatgctgaggaggtcgatgtcgagcacaagatactggtttttgtcctgaccattacgaatgtttttcacagtcgagttcagcgcctccgacatcgatgcgtgattcgatggagctgttgtctgggattcaaactcggttttccaccccggaacaacaccacggtggacgacctgctcccattggcggtggtaggcgtacgtagcccagcttggtaaatgggatgggatctccaacgctttgttggggcgcggatctgatgttgtttcaccacggagaagacgtacaaactcgggcaggcccatacccgaccgtcgaatgaagtcactgtagacctgctgtttcttgcggtcgagtgaatacggggtggaattctgcccggccgggtcttgtgacctcgggtgagatagcgatagaccatactcagcaagtcgaacgtccagtccagctcgcgcagcctcgcgatgataagtcagtagcttgtggcggactgccagtgtagcttggtgacggcggtactgctgtgaaatgaacgcttgctgagactgatcgcttgcttctatgccttggtgagtgccttcaccccggtgcgtggcggggatgtcacccgcgtttgggagaccagcatagctcgtggccctaccactggttgcaggggaaaccaccgtgagacttccacccatgttgttgtcgagatctgcgtgcagtgacggagacttgtttattaggtctgactccgaccttgcgctgccctcggtgacgggtctcgacaggaaaaatataccgtcaccgaggggggagtaggaccgtcacgcgtcgtctggttctttcgccaaccttgcgaactccggcttgaaacctccgtagcagcaaataatcacatctcgaacctccgacggcaaacggtcggggcaaaaatgacctctatccttggagaagcatccatcacggcggctcgggcaaccaattctggacaaatatttcatacaaagagacttgccattcagtaccgggagcatcttcaacagtgcctctgtgatctcggctcgttctcgtttcacctctttcactgggcgcttgtgttggagatcgcaagagctggcgccacctgcgatgagtgcagtggcgacgataacggcctgcgacgaccacaacgacccctccagctacacaacacgaaactaccgatgcatattagcctagcacagacatcctagcatcatccaacctaactcattctgcaatacaccaggtgcgaggcaccactacaaggagcaaccgtgcaggatcaacgagtgctcccttcaggttatgagcccaactggctcgccttctgcagcgaccagtgaagacttcgaagactcgcgaggcgaccacgaagaccttgaagaatactcggaggcacgaggtgctaacgaggctgacgaagaccaccaagacggaaggaatactcgcctaggactgccagacgacctgcacttcgacccttcggaccaagagacaatggagcagcacgaccagctccagttcatccttcgactgcagtccgagctggcagaactgaagaagcagctcgcgacgcgagcgccccgttccccctccatgtcggatactagcatggaaaccgcacctccatcaccgaagaagcctaaaatcaaggacgtacgctgctcgaacttcaagggaaacgaggtttaccctgggttaggagctggcttcgagaatttcatccacgagttcgagcatgctataaggacggaggagctcgtgaacggatccacctggaccgacgacatcaaggcatcggtgattgtcaacttcctcgaggggaaagcgtctaggtactatcacaagaagaactcagagtggctgcgccgtcataatggtgacagcatgccgtactcagatgtgaagcgcgcgatgcgtgcagagtttggctgtaaactaagccaactcgaactcagcacgaagatgcagtataacaagcgtgaaggcgatacgtggcatgactacctggaatacttgaacttcatcgagagcctcatggaaggtgatcagaccaagatggtcatggaggtgttcggaaacaatgcatgccccgagttagcgcccacgctgttgtcttcagtgcccgacgacgcaagcgattacgttgcggaaaccgatcgcatgaggcgactgctacacaagctgaacggtgacgggcgcagatgtggtgcgaagcgagatgaacgcaaaaaccgtcatgctgaccgccggaacccgaattcacatggccaccgcagcggaaatcgccacaatgatgatcagcattggcgtaaccagcgaaacaacaacgacaactcggatcgacgtccgcagcagcaaaatagcggccaagcctttgccgccgctggtcatcgtggtgaaatacattgccatgtgtgcgggaagcctggtcacaagattttcacgtgtccactcgtggaacaggcaaaacaactagccacaagaggaagtgcgaacgtagccgctgctgatgatgacgacacatccagagattctgatgatgaaggctatgtctgggtcgctgccgacggtgccgagcgcggtgcttctgccacgagaggaaatgtttggacagtggattcgggagcaactcaccacctttgcatcgaccgtgaccaactttgcgcgatagagccagcattcctgtcggtgcgagtggcgaatggagatcttgtcgccgctactgagaagggaaagactgtcatcacgacgatggcagaaggagtgcctcgtactgtcctgctagaaaacgtgtacttcgcaaaaggtattgaccgcaacctgatttcagtggctcaactcaccgctcgaggctacacctacacctttggtgaggagcagtgtacaattacgaacaagacgggcaagattgttgccgaagtgggtaattcagcctcgactgggctttggtctgttggaatcgagcaaggcgcggcctccttcgcagcaatgacgacctctacgcttcagcagtggcatgaacgcctggggcacgtgagctaccaggatctggtacgcatgattgacaaaaacctcgttgaaggcatggttgcctctaatcggaaggtggatttctgcatgaactgcgctgaagagaaacaagctcgacgcgcgaagaacaagcaggatacttctacatctgccccaacggacgaactgggcgctaccttgtgcgttgacctgaagacggacatgatcccggatcggctcggtcacaaacacattttgactattgtagaccacgctacgaactacaatcgcgtctactggctccgcaaaaagagcgacgcggaagggcatttggaggactttgttagcgaatttgagcggcaatacgacaccaaggtgaagatgattcgctcagacggtggtggtgaatttggcagcaccagactcggccgcttcctccgcaaccggggtattctccaccaagaaacggaggcgggcacgtcatcatcaaatggaaaagcagagcgttttcaccggactgtcatggattccgcccgagcgatgctctgggcctcggcattgccacagcgattttggggcgatgctgttctgtatgcgagctacattcgcaactatctgccgactcgagcgaacgccgaccatgcgtctcccattgaggccctctccggaaaacgacccagtgtctcgcacatcctcaaacggctcgaagtgtacgagccacatcgctcatgcaacgaagcgatcagcgaaaaagcgcgctgaaagaggagttgttattggcatcgacttcaagaagaaagcgtaccgtgttctcatcccgcgaaccaaacgtgttatttctacaacacacatccggaacgttgaccgtctggactcgcgagccgtggggcgatacatggacgccgtcgacgcagacaatagcggcgaggaggaggatgctggcgatcaatagtacgaaaccaacaccccacatgacgctaatggtgaggaagcacgggctggtagccctgcagagcagcatcaacttacgtcgcgtgccatccagcgcatctttggcctgaatcaaggtacacgagcactactacgcgatgactttcggctgccccaatcttttctcgaagagttcgccactccggcatctgtcctgctcactatcgtactcaaggagggtactgcctttgcggtactactagagcgtgacgggatcaaggagccagtaactgtggaggaggcaatgaacagcccgtagtggcaggagtggtggcgggcaatcgaagaagagcttcgagcaatatcgaagaacgctacctgggaaattgtggatattcctactgatggaaatctgataagtgcaaaatgggtgttaagctcaagtttgacaacaaaggcgaattggaacggttcaaagcgcggctggtagcgcgcggcttcactcaaaagtttggcattgacttcgcagagacctttgcgcccgtgctcaagatcgcgagcctgcggttcattgtggccctcgcatctcagtggcatgccgtcattcgacaaggagatgttcctaacgcatacctgcgagcagacctcgatcgacccatctacatgcgcgcccctgtcggactccaattacccaagggcaaatgcctactgctgcgaaagagtctgtacggccttaaacagagcggcaagttgtggaacgacactatacaccgctacttactggaacttggcttcaggaggagccaactcgacccgtgcttgtattttcgttggcatgaaggcaagctaactgtactgggcctctacgtcgatgatgtggtggtcgtcagccagcgtgagggcgattccgactggacgatgcagaagctcgccgaccaatttcagatcaaggacatgggtccagccaagaagtgcttgggaattaacattgagcagagcgactgcggcatctacctccaccagacagccaatattcacggtttgctggcaaagtgcggtatggagaatagccgccccgtgactacgccgatggagtcaactcgggacctgaacggagaggccagcgagcccttctacgacactagcatcatgcgggagaccattgggtcactactatggattagcaactgcactcgaccagacatcacgatgcctgtgaacttcctggcgcgtttcgtctcaacgcctacgtccactcattggactgcagtcaaacgtatcctgcgctacttgcgcggctcgcacgagttgaggttgcactttccccggccgcaggcaccccgacacactattgaggcagccatcttcagcgatgcagattgggccggggccaaggacgcaaagtcgacttcaggaggactactcaccatcaacgccatgcccatttcgtggtacagcaagaaacaatctacggtcgccctctctacagccgaggctgagtacatcgctggggcgacggcagtgcaggactgcttgtgggtgaagcagctcctgaatgaacttgagctgcacggcaaagatgatagtatcgacatgtacatcgacaaccagagcgcgatcaagaacatggagaacgacgtgacgactgcacgcatgaagcacatcaacataaaattccacttcatacgcgacgccattcgcaagaaggaggtcagcgtgacctattgccctacgactgagatgaaggccgacatgttcacgaagcccctcggcgcaaccctacacgggcgcaacctggccatgatcaagcttatcaacccgcacaacgagaagctgtagactcggatcatcttggtcgaggaggactgttggagatcgcaagagctggcgccacctgcgatgagtgcagtggcgacgataacggcctgcgacgaccacaacgacccctccagctacacaacacgaaactaccgatgcatattagcctagtacagacatcctagcatcatccaacctaactcattctgcaatacaccaggtgcgaggcaccactacaaggagcaacccgtgcaggatcaacgaatgctcccttcagtttggcattgacttgtcgcgacgctgctcgaccaggctggctgtggtgaccacgctcaagtaccgctagttgtttctcggactgcgcaagccggcactcattgacgacctgcattaaccgcgtaaaggagacatccccttcgtgaaatgattcatgaacggcttgagctgcttcaatctggtcttgtgccagcagaagtctcatcgattcaaagcgctcgtccacccaatgaaccaactcggatcgtgcttcggggatgccaaagctgcggctcagccttgaacgagtcaacttggaaacaaactcgcgtgccttctccactatgtttgccacgaatgggaggtagattatctcagtcactgctgctagacccgacagtgcagaggcaatcgatgctaaatccggcggtgcacccaacttaggcagcttgttcttccgtgaaaaatcagacatatcgcacgattgaacacgttgacggcgctccatgtccgtcaatcctccaaaatgcatggtactcagaccacgcataccgaaatcccagcacagaaatccacagatgacggccgggtgtggtagtatgtcagtcgaccggaggcgaacctgcagtgtttccgccagaagttgatagcccaatctagcatacgtaccatttattagctggcggttgatctggcgctgtattgcagtcgggcgaaactgtgccttggtgtctgccgcgccgctggtcgccccgtcagatgtagtcgatgctggctggttcagcgacaggagacgatcgatctggcgcaccatcgcagggttcgtagcgtacgtatcacggagcgttgagagcgaattcatatcgtccgtcaaagcctcgcgaatgtcacgtgtacgcttgcgcgatgcaataggtgctgacaagggcggcgaagcacttgggcgatgcatgtcaggctgggggacatcgtcgtcatcatcctcgtccgaatctcttaaagcggccgccattgaagtcattgctggttctacggctcctgttgcgccgcgcgtcgggatcctggcacccagcgaaggaaccccaggggtcccgagtgttggagtctcgaagatggagtcgccgagagctacccctcgcgggatccggcgtccaccctccttgtagtacgcgtagtcaagaacatacttagtcgagacacggcagattcgtccttttgaggcatcgtagagcacaattgtgctgtcctcgtccatcaacggagcttgtaacttctcgagaatcgacttcgagcgtcttgtggctctgcagcccacgcctttaaagtggttgagagctgccgcgtgaatggctcgcatctcagcgggcattaagtcgatgattggtcgattgttgcagggtcgcaacgtgtatggcgcgtactccagcgcttcgatctcgtgttccttgaaggaaacggttcgacatcttctccgaacgaaatatgcagtaccccgccatgaaccagcgtgccccagctgtagccggcaacagctccgtagttccaggaaggcgctgccgatggagggacccgcgcaacgcaggcacacgctccaacataggttccgatcccacctgtggcttcttcctccgatacagcacgcagtagcatctccgaccttgggcgccggacctcaaaatcgcctaaggcgctccatctccccgaattaacgcggcgaacgtcgacaacggacgctgcgtcgtctccgtccagtagctccgcttgaccatatgcatagccacgtgtgtccagtagaccgggcttgaacagggcaaacactgagcgggtggccatgggtttgggcgcgaaaggctgcttcttgtgcgcttgaagggtcgcttcttggctaccagctaaaacgaagaatgaatagatctagactacttacggcgccctggaaaaagaagtttcatctttctccgcctcgcacctcttctggagctcctcagtcgttgcgaaactacctggatctggcggtgcgaaaccactcttcggcaggatatccgccaaactcgacatcattcgcctcaattccgcctaggagatcctcactaccgttcgagtgcaaaaagagcaatgtcaccctcgcagcgcttatcaccacagcagcagcggccacgttttaggaaagtgcgtgtgcatccaacgaaggacatcaagacagcctcgagctgctgcagcttcaacaaatgctgcgttaggctcggcgcactctggacggtgaattaggagccacttcgcagtcttaggatagtgtgacggggcacacagcacttcttaacagaggaagcaggagtatacaaacgccaagtgaacagccgttcacgtgtccctggtctgaaggggacgacttgacttgaaaagcggtagatctaagactgaatgtatttataggttggtatagatttagcctgcatacaaatcctaagttccctatagtttgtgtcatacaaaatgtatctgttggctctgaggccacttgggtcactatccaggggagtgaccgatgtagccatcccggaatagtgacagggtcactattccatgtaaccccgttacatcctcccccacttagattggatcttatcgaccaatcagagcgaggttacgccggcgactcacatttcactcgcaaagtcgaaatccatcgacaacggcgcgagctctggcgcctcggctcccgggcctcgcagaggaactggcgcatcgccgagcaagccgcagggtctccacgtcgaccggaagcatgcctccaaagcgcagtgcgcgtagtgcgaaagcacctccgaaaccgcgggccgtagggccgaagaccagggcggccaaggccaaggacgagttgtccgcgctgatggaggccacgaaggcggccgaggaggtggtgcgctctcgtagcagcacgccggagagtggccgtcagaccggggctcggagcaagtctcctgacgccgcgcaaggcaaggaggagagtcctcggggccataaaagcccggctcgcgactgggaagccgccgtctttgactgcacgatggtccagtactccggtgagagttcacccgacgacgagaacgtctcggagggcagcacgcacgctgccgaaggcacggagctggtggcagacgacatgaccaacgcgtcggccgacgcaaaggcctcgtcagagaaggaggcggaggacgccgagtccggctcaggcgacagcaagcagtcgcaagacgccatgaccgacgctgggttcgtggccgagaagtcgccgagcgacgcgggctccaagcccaaggaggtgctggcatcgaagcatctgacgctggcacgaggtcgtgagcgtgcccaagcgtcgaaagcggctgccgctgcgaaggccgccgaggccaaggcgaagaagcgttcagcttccaggtcgcctcgcggctccagctccaagctgttcatcgacttggagtctgaggacgaggagggtgccgtccacgagcccaaggagctctccaacaacctcgacgagcagcagcagcaataccacgctgctagctcgggtgcgaatgccaggcagccgactgccacgattgccatcgagtcttcttcaggcgaggatgccacgtacccgcagggctacttcccgcccgagcctggcactggtgcgccagcgctgttggagaagctctcggttcctcgtggccttatcggcaggtacacctcgaggggttcctatgagcgtgctcttgttgagaaagagccactctttcttggcgacgttgaagtcgcccggtgtgtgctactagcaccacacaagctcacactgaaggagttcaccacgcttcgcaagaagccggaggacaagggtggactccatcctgtgtggggtttccactgggtcatgccgaatgacaacatgagctggagcgaggtggaagacctcttctggcgctacgtctagcgcaaagggtattctgaccaagtgttcaaagaactccgtgaggatcacactctgtccgcaatcctggacgtgcgcgagctccacatcgagttcgctcaactcgtgagcaagcgcaagctccactcgcaaatggacgagctgaagcaagaggcgagagccaaagctcgtgaagagcgtgggcgtggtgcgactacgtctgctaccgtgtcccgggtaccggccaagaagccaaggactacttacgaagctgccgctgcttctcgtcccatatcgcaacacccttcgggcagtctgcctggagctgctcaacgggctcccacgagttatccgactcagggtaacccctccacttcacgagcagctggcgcttgccatggagccgccgctcccggacgactcgttccacgtggtagtggatctgcccattacgatcaaggagggccggcggtggcctcgcacggccatggctacgagcctgaggcgacgcagccgtatgctggggccccgagtcaggtggtggccctgcagcaagaggagattcgtcttctccgggaccgtgtgtacgtcctcgaggtcgcgcttggtgtcggccttagtggcgaggctgccgctcgtgctggtcagcctggtgccgtggagcggctccgtgaggatgttgcctcgctctatcaagaaactcgcagtctccatggccgtgtggatcgtcgagccgacctgccatcttacgactcgctgcgaaaccatctcgctgggcgtcgggccgagcgtcatgaccacgcgccgtatccggagcagcagcagccccactcgtatcaggcccagtttggccagggctcgtacggggtccctgagtatgctgctccgatgtacgccgcgccgtcttacgaccagcgagcgtatcaggcgccttaccgcgacccgacgccgcgcttcgaggagctgcgctcttctccaccgggccacccaccgcttcctgcggggcagccagagccagagggtcatggtacctcttaagacgacccacgtaaaacgtcgggtgagtcgtcatcgacttgggcaagtctatggtgtacgccgcgccatgccggctgaggaccgtgaagggtccaatgaagcggtgcttcagcttgttgctctcgaccgagctaacagtgtttagcgctaggtttctagtatctaggagaactaaatccccaatcttaaacacgttcatgtttcctcttccatttcggtcagagtactccttctgtttatcttgggcttgcgccatggtgtctcgcaccctgctgattatgttcaatctgtcttcggcaaacgaggacagttgcttccgcaaggtggctggattcacgtccgagacttgggaggaaaaagttttccgagcctctcccccacttaggaccgaagccccggtactgcctcgtaatgtgagcagcacctgagggtggcgcaacccgttcagataaagggcgtaaagcccgtcgatgcatgtaccgcattgttgagtgcgaactcaaccatgggcaagcgatcagcccaagagcggggcatctccgcgcagatactgcggagcgtgtcttcgagcacgcgatttacgcgctccgtctggccatccgtctgcgggtggtccgccgtcgacatcgacagtcgtgtgccgagaaggcgaaacagcgtctgccagaacgtagtggtgaaccgcgggtctcgatcagagacaatggtctcgggcagaccgtggtgtcggaagacacagtccatgaacaggcgagcgacctcgtcgccagtgacggtgtcacgaactggagcaaagtggaccatcttgctcagacggcacacgaaggcaacaacaccagtgttgccacggtcatcggccggaagtccgaagacaaagtcgagactcatcgacttccagcagtccgctgggaccggcaggctctgcaatggtgccgaggcgtgacctgcaggcttcacgcgctggcacgtctcgcacgtacggacgtaggtggcgacccacttgtacatgtgacgccaccaaaacatctgcgagacagacgcgtacgtcttctcacggccgagatggccactggatggagcgtcgtgcgcctccatcaggatgtcgtacttgagatcctcgtcgttgggcacgacaatacggggaggatcctcgagctcgaccctatagtggagcaaaccgtcagcccactcaaagcggtgcagccttgcacgttgtcggggcgtgagccactcggccttggcttccgagccagcggccaagaaccgcacaagaggtccgagactggcatcgtctcggtaccccagcttgatgcgatcatacagattcgtcgtgacccgactaatatgagcaagctcgtagtcgggtcggcgcgggcaagcacgttcaacttgcccggcttgtactcgacacggaagttgtattccgcgaagaatgacagccaacgcgccatccgctgtgagagatgcggcgtgttgacggcagtccgcaaggacgcgtggtctgtataaacgacaaagggcgtcgagtccaggaggtgcactcgaaacttgacaagagcgtacttcatggcaagttgctccttgtcgtggactggatagttctgttcggctgccttgagttgcctggactggaacgagatgacccgttcggggccttcatcgtcggcctgcaatagcgcacagccaattgcgtagtcagacgcatcacagactacgctgaaaggcttcgtctcgtccggcaatgccaggactggcgcgcgctgtaagcccgctttgatgtcgttaaaagcatcttgatggcgacgctcccagcgccagtcgacatccttcttcaggagagccgtgccagctcggcgtagtctgcactatacttgtgcaggtagttggcgaggcccaaccactgtcgtaggtccttctgcgaccgaggtggcggccaagccgcgatggttttcaccttctccgggtccgcccggaccccggcgctgctgacgaagcagcccaggaccttgatctcctcagctgcgaacacacacttgtcgatgttggcgtacagcttgttcgcccgcatgacttcgaacacacgtcgaaggtgctggagatgcacctccatggcagtctggcctccctcggcacggctgtggacgaagatgtcgtcaaagtacgtctgtgtgaacgcacgcaaaggtcggaacagttgtgtgaccaagcgattgaacgttgccggggcgttagaaagcccctgaggcatgaccagccactcccagagcataccgctcggcgtgctcacagccgtgagtggggtgtcgctctcgcgcatcaggatctggtagtatccgtccaccaggtccagcgcgctatacagcgtgcagctggccatgttgttgagcaacacgtccttgcgcgggatcggtgtctgcgcaggcactgtcgcgctgttcggcttgttataagcatggaccagacgccactttccgttcggtttgcgaacacagaaggtaggcgtcgagtgcggggacttcgactcccgcaccatgcctgccttcgccttagcggcaaagaaggcatcaatgacttcacaaagctcccggggaagaggccattgcctcgtgcccggcacgagatcgatctcgtgcctgattcccctgtccggagggagattggacggtggatccttggacaccacgtcctcgaactccttcgccaaggggtacaccgggtcccggggttcttaagaatctctgagcccatgcgcgacgcgcgctgtctctggaactcctccaggactgcctggtccatgaccgaggacgagttcaactcggccgacgtggactccggtcggaggagaaccaactctgcgatctccccggcctttagctcggccaagaagtcctccatggcgagctcctcaaggttcagcaactctgaaacctcgggcagagctgtaagctcgacagctcctgtcttgacccgacgaccggtcacgccgtcgaagatgtgataacactcttcggcggctggagccttggctggaggctcggagtcgctggcgactggcgtcgtcggccacacgactaggcccggcttacgacgtgaccctcgggtgtcttcgtctcgtggcgccgccttgacggcaccaccgatcttctcgatctcgtgcggaactacgttacccgccttgtccatgagcggaacttggttacccgccttgctgggcggaactatgttacccacctcgccgtgtggaacttggttacccacaccaggagcgcttccagcgactcctttatctgttatggtctgagtgatctcctgtggaactatggtaccaccatcggaagcgcctgcagtgccttcctcatcagttacggtctgagtgacctcgcgtggaacttggttacccacgccaacgccagcggcgccttctccagcagcccttgctgcctgcggtacttcgttacccgcgtgtggacctacgttacccacctggtaggtgctgtccggcacctccactctcaggtcttgtccggcccggtcggagtcgtcgtcagtctcgacgggccccaagaactcattagacgctgctgcgccctggcggccctcgcgggcgccccagctgttgccagaggtgggaacatgactcaccaaagctctgtcagagcgtgggggacggctggccccgatggccttgccgcgccagtcgatccgaggctcgtgtttctccagccacggcattccaaggatcaagtcgtacttgtccatgtctaggaccaagaacggctccgtgctgtcgaagtcctcgaacttgacagtgatgtccatgtgggcccgaggtacttctaccaccgtaccgtcggccagtcttaccgagaccagcccgttgcctttgctgactcgtagcgcatcggcgtacttgtcgcgattgcgtgcgacagtctggcggcgcgcaaagttcttggacaccccagagtcgatcaagattctcaagggatgatcgtatcccggtacactcgcgtgcaccacaagcagcccaccgccgtccttctccgcttcgagagtacagagactctcaggggttaagtcctcatggcgtgcgccacccgcacgcccctcatgaagacttagggtttccccagtagggcgccccgcccctactggtgtccggcgttcccctggttcctgcggcgcggcttctgccagcgacccctagagccaaagggcttcgaagagaacttcttcttcagtcctcccgcgggacaagcacgtttcatgtgtccaagcttgccacagccatagcagcgaatgtcgctctgctcggccattcccagatctatgggaaccggcccgttgatcgctccattgccggagttaccattaggcgcaccgccagaggcagggttgctctgccataccgtggcgggggtacgagcctgcttgtggctgtactcctcctggagggcgatctgaatcgcctcctccatagtgtttgcttgcacacggaacagttgcgtgcgggtaggaccgacacgcagaccgtccatgaacacggtcaccttgatgtttccaggcagggggttccccaccaaagaggcactgagcactcgcatctcctggatgtactcatgcagctcgcgccttccttgtttgcaggcgaggaagcgcgaacgctggcggtactcgtagttcgccggaagaaacgcggcccgcagctgctcgcacagctgggaccatgatgcgaagcatccaggcgtcgtcgcttcgcgcgtatacgcccaactcttagcgcgaccactaaggttggagagcgcaaaggcgacacggaatcgctcgtccgagacgagagccgcgtccatcgcgagctcaacctctcgaacccagaaatgaaggttttctccttccttcccttcgatggggtgaaccttcagccgcaggggcttcggttgcaccggcttcggcgcggccgcagtgggctgcagcccttgaacgtgggcgatgagccctcgctcgtaggtgtcgaacgcgttgatacgctcaacctgctcagccggcgtcgccgccgctaagctacgcagggcatctgtcccaaagatgcctgccatcttacgaacggactcgtactgcgagtcgttcagatggggaaactccgtacgatccatcttggctcactcgacgagaccacagaggattcaggtagtccaatctacccgcgtaggcgtaggattgactacaagtgctaccaagtgtgacggggcacacagcacttcttaacagaggaagcaggagtatacaaacgccaagtgaacagccgttcacgtgtccctggtctgaaggggacgacttgacttgaaaagcggtagatccaagactgaatgtatttataggttggtatagatttagcctgcatacaaatcctaagttccctatagtttgtgtcatacaagtatctgttggctctgaggccacttgggtcactatccaggggagtgaccgatgtagccatcccggaatagtaatagggtcactattctatgtaaccccgttacagatagccaccctaagcgatgtgctcgaagtgcagccctcggagcgatttccatgtagtcatttgacaacgtccaagtggccactgcgggccgcgctatccatcgcagcggttgtgcacagccaccgtacaacgtcgagcttgccatttcccgaagctagacccatagccattgctgtgcatcctttggagcgattgagatgaaagtcactttaccacgtggagaaacccaccgcatgctgctcgatccatgacttcagttgtaaccccgtcggcttggtgattgtgcagccactggacaatgtcgagatggccaaaggctgcggcgccaaccatcgccgcttgtgttgtccatggtttccgctcctcagcgctaacgacgccaccagcgcgcgctcctattaagtcgtggagtagctgtaagatgtccagatgaccgcttactgctgcggcatccaaggcagtgccaacttttatctcgcgtacaaacgtgtccttcagctcgcgatacaaagcaacgtgtgacccaaactcagcgtccagccatttcaccacgtactcgctgctgcatgcgccatggttttcgccgaagcgttcccgaacttccgggggtagagcagttttgcaactcccagatagcctcgaactgctgcgtagtgcatagcgtgggggtgatcatccaaaaaaacgcttgactagttcctgctcctgttacaggagccattcaaccactggcaggtggctgtgctggcacgccaagtccaaggcatccagccagcagttctcccacattagttggtctggaaccggagaattcatctctaaatccactgtatcattgtcaaattgccttgcaacgccatggctctcatgacctgcgccggatgcacactttgaatgcggtcctgctgctgaaacatccaacgcacaatgtgttcgtgcccgctatccaatacgttagaagggtcatagggacatcctctctgcaccagccactccaccagcgcagtgtcaccttgacttagcgcagcttgcgcggcgcgggacgtgcggtagctggtgtgtgttctcgaacagccagcgcccggccgctcctcgcggcgttccgcatgtcgtcgacgcccccattcgacctcgttccctcggttctcaagcccctcaggcagcggcaatttggttgcacctcagatcgagactcagcagcagtggcagcacgtcgtagtggccgttccgtgtggcctcctccgccgccgccttgctcatgctgcagctctcaaagtgggcgaagggccaccgaatgacgtcctaatggcccccgcgcgccgcctccttgaccgactcctcgaactgccactggtagtagacggggtccgatcgcagccagttgaagcgcgaccatcctggcgctcggtcctccgctgtaatgcagctgctggcccaaatgtggtccagcagcctcagcgacccgagcgagcaggccctggccagcgtcatctcgcccgacgggtccaggaagcgcggaatcgccgtcaccacatggggcagagcgctgaccgcaggcttgtcgcgcaggccgatcgcttcaacttgatgtgggccgaatgtcgtcccaccttcgagcaacataaggttttccgaatcacttctaaatcctatacacctttataatgtttactatgctacgcttaaagcatagtcaaatcggacctctttagttacatcgttctgtaagcctttgtggctgtagttcgttgaactgtcaccgcgcgctttcagtttcgtcgccgtgtgtttcgctgtgatctttcgtcccatacatacgccaagtgcccttgcgcgtcccgcccgcccattatcgtcatcgccatgagctctcctgcgtctcctccgtcgccggcggcggcgtcggcgctgcgccagatcccgatcgtgtgtccgggccactcgcgccccctggcggagctgcagtacagcggcggcaacctgctcatctcggcgtgccacgacaagctgccgatgctgcggcacggcgactcgggcgactggatcggcacgttcgagggccacaagggcgcggtctggagcgccaagctggacgccgacgccgatttcgcggccacgggcagcgccgacttcagcgtcaagatctgggacgcgctcacgggcgacgccgtcacgacgctcgagcacaagcacgtggtcaagtccgtggccttcacgcgcgacggcgcgcggctgctcacggcgggccacgagaagctgctgcgcgtgttcgacgtgctgggcgtcaaggagcagctgcagagctacaaggccgagggccgcacgggcatcgtggtgctgccgccgccgccgctcgccgagatgcacacggcgcagcagatccgcaaggtcgtggtgctcagcgaccgcctggcggccacgggcgaggtggacggcacggtcaccgtctgggacctggacgcgtacacgcagacgcgccagttcaaggtggacgcggacgtcatggacatggaggcgtccagggacggccaggtgctcacggtcgcggccggcaagctggtacgagaacgaagtgtttggagctggttgttagacggattggaggctgattttggtgttctgctgctttgtaggtgtatttctacgacgtgaagaaggactttgcgctgctgcacgccttcccgatgcccatttcgttcgccgaggagggcggcgcgtcgctgcatccgaccgagagcaagttcgtggccggcggctccgacacgtgggtgcgcgtcttcgacttcgagacaggagagctgctggagacgcacaagggccaccacggacccgtgagatgtctgcgctacgcgccgtcgggcgactcgttcgccacgggctcggaggacggcacgatccgcatctggcagaacgactccaagtcggcggcggccacgtccgtcgccgacacggccgctagttccagttaaagtgcgacgctgtcttttggtcctgcgtggacgcgaccgccacaggcagcagccgcagccggatcgtgaacggaagcgaacttagagagaggatggcagcagcgtgggcgagcagtagcgacccgcagaccagggaaagcagagaaaataaagtgtgaaaactgaaaagccgacagtggagtgagtgtgggtcgagtcacatttcgacagtatgtcttccttctccatgtagcagcagtagcgagtctaccgctgttgataccactggatgatgtcgtgcagctcgatgaaccccgtgttgtccaggtccagctccatcacgaggtcttccagcagctcggcggggctgccgtcctcgtatccgtccatgcccaggtcttcgccgaggaacttgcccaagtccttggcctccatgcggccttggccgtccacgtcgtagctctcgaacagctgccgcatgcgccggatctggttctctgcagccttgcgctgcgacgcctgcaccgccttgtcctggaaccactgctgcgagaacgccagcaagtcgctcgggttctccctgatcacggccttcgtccagtccttcagcacgtgcggcaggtccggcggcaccgcgatctgctccgccgagaaaatgcgattcacgtccatgtcgtggtcgtagtcgtctgctctgcggtcagtcccttgttggtctcctctaaaaagctggaaatggctggaaacgaccctctgggcccttcttgatgcctcttcacaccaaacttaccggagcccgttcatagcgtcgacgtctccgagcagaatcttgtacgagtgagtcaccgccacgaacgcgtccacgcgcttgcccgagttgctggccccaacgttcttgcccgcttcagcgaccgtggactccagcgacgcggaagtatccgaggccttgtcggggtgcagcttcaacgccagcttgcggtactgccgcttgatctgctggatggacgcgtcgcgcggcagacccagcacgccgtggaagtcgcgccgctcccacatcatccgaatgcgctcgggctgccacaactgctcaccgtccaagcaaccggagcctgatgccaagcccggggtcttcgcgaacgccgagcgcaccagcttcatgcgtacgcgggccgcgcggaacagatcctcctgctcgttcttgtcggacggcgcgggccgccacgtgcgacactgcgcgcgctgatccatcgggccgagaccgaaggcgccctcgatgccgcagtcgaatgtcggcagtcggccacgagcgccgtgaacgttgcgtgcttggaacgctgggccacggtctgcacttgagtcgccatggcctccgtgagctgctgctgaagagtgcgctacttccccattgtcgagaccatcggatgccaccggattggcgccacgacgctgagctgccacggggttgatcttgaagcgccgctccctgcgagaaggtgccgctggggctgtccccctcagagacgcgttgagtgaagctatgaagtcggccgagtctgcattagaagctggagtggcagatacgtgatgtccagccgtggtccgctcggtagttgaacccgccagtaagcaggggcagtgatcctcgcagcaatggcactgctggcagaagaacagcatcccacaatgccgcccttcgttgcctgcagacgcgttgctcatccacttgcaggcttcgttggactcgatcaggtccagcatgtgcgtcatggttttctgcaccgccgagagtcgcgacgagcagcacatccggcacccgcagctcacgcacacgcaatgaagacagcagccggaacaaccagtgcaccgacgtcggagatcgcggcagcctgagcaccccattcgaagaggtgagttcccgtccgagcgctgattacggctactgccgttgttacgcactgacatggctctggacgacgaagtcttcgaccctgaagacgggatgataggcagcaatagactggcttgtgagactgcgagcgccttcgcaacgcgaatggactcgcaccgccgtctgttcgctggacttttcttcgaggagtgcgagctcgccttcttggacccatgcgagtgacgtcgagcaggtttatctcctttgggagtcgacgcagctcgagcagccttcgtagcggatcgcgtctgcttcggcgctggttttggcgattttgtagtcgaggtatcggttccatcagtgtcctccaacccaaggaacttgcccaacgcttgcatgcaagacgcggccagccctttgcactcctcaacgagggctttctggtcggcgttcaacgaggaagagcgcaacgtcgcgccggttcccttcttgttgcctcccttgatgtcacgcagcagttgatccttggccagcgtgatctcgtgacgaagtttcttcatctcgatcacgtccggggcatccttatcaggatcaaacacgccagtccaatcgatcgccatcgccatagcatcaccaccagtttcggcggtgggttcggcctgcgactgccgttcaggtgtctcggacgtttcctcctcagcgacttcttgatccacgctcgctgtcggcgcaggtgcgggtgcaaagtcttgatacttggtgtagtatcgcgcccactggtgattcacgagtttcttttgaatcgctacttgcttcgccagttcgcgcttgagagtgttcgagtgctctacgtgagtacgccatggcccagcgtgccccaactcgctcatcaaatctcgcgttgtcgccagcgactcctccagctcggtccgagcctcctcaaccttcagcggtgtcatgatgcattgcttcgcttcatcccgcgtgaatggccggttctgtacctcgtcacgcatatttgcaggtgtcaatcgtagcagcgcagccacctcttcctctcttgaagtagggttctgacttggaggaactgaagcgcgagcgcgtgtattataaccgctgtccacaattccttcgtcactgtgatcaagtggagactcgtcgacgcgttcagggtccacgaaatcatccttagttgtgtacagaagcgcctcgttgtgccaaatgtacagcgcgtcttggaggcacgtgaacttgtcgtaggatctatcgtccaagtcatccacgtcatcgggatcaaaccacgcacaagagttctcagcgaagaggatccaccacttgtgaagctgcagctttgtgttttccacgatcacattcgtagtcacagactttaagcgattcacgtgctggatgatgcgctgtcgacgaagactaacgtggttagcgttttccctgtgatgatcaggacgcttctctttcagcgtgaccaccagctgcttcgtgatcgagtccaaatcgcgcatgtacgccgtaagtctcaccaacaggtttcgtaagaagaaaccactcctgggatgcacccgctggttagccacctctgctacttcggcgatcgggggttcacagggatcgacctcgcgcagaaaatcaggaacatcatccttccctttccactgcaacacgtgattcacgacctcaggacactgctcaatggtttcgcgcaccagtgagatcggaagcgagtcgaacaggctggactcgatagcggaggatcggatcggccgcaaaatgtacgtgaacagatcagactgtagagttgtctcgtccagaaggttttcgtggctagcaccaacgtgggcagcggtgcggctgcttccgatcacgtgcctcgccagatagtgtttgccaagcatgtgtgccaccagcgctagcgagtgtaactcaacgatttgatcctgcatttcactccactctttatgtcgcgaggactcgaatacacccagttcaatgctgagaggcgtctgcgtgccgggtgatgagggaagaggcggggccagattcccaagagcacgcaggcgttcggcacacaggacaagttctttcccaaagtcagcacggtccaagatatatcggtgaagtatatgaagatcatgagctgtgagaagccatcgctccacgtcgtgcgagtacgacgagctgctcattaacggctccaggtaaaagtactgacgctcgcctgccaggaaatgtagcagcttacagtccgtctccgatgaataatcttggatcaaattcagatcacgcgtaagacctgggatctcccaggtagaacggaaagagtcccgcctaggattgcttctcgcatcatctccatcttcaacatccgccatcatttccaagccagcctcagccactgagtcgccgttctcgttctccatacaaacatcggcatcttcgctaggaaattcaaacgtatctgcatcacccgaaggaacatccacgatctctgcatcatcgtgtgcattagtctcctctgcctcttgttcctctgcgcccccagaagtgatcatttttccaaaggcccggaccttcttgaccaaacgcagtaagtcatcatcctccgccaagccattctttgccacagaaaccaccgatctaccaacaagcggccgtttacccttgaacccacgcaagttgggggcaagaacgcggctggctgcaggtgggcatgcgtcatgggcgatacttagccgctcgatctcacgcagacgctgcttcttcttgctcggagacgacgtcgacaatgccgaagccatcgcactgcactgctgcttaaccacaagcactgcaactttcttgcggtgctcaatctcctcaaactgacgccgcaaccgcagatatttatcacgctccacagcctcttgcgcgcgagcgcgcgtggcctcagcttccaacctccgcgatatcattatagtgcgtgccagtcgtatccggaacgcctccctctcatcgcgaagcttccgttcttcctccgctctcattgccgcctccgctgcagcagcttctctgtcttctttacactcttcgtcctcacgtctaggaggatgccgctccgaccggtgcgactcgcgaggctcgttacttctcccgcgtttcgccgtaccactagtagcaccagcacattctcggcggcgcttaagatgccgctgctgctgtgttgcgccagtcctctcgtctcggtcagcacttcgactgcggcttctactccgactcggcctctgcacctgctgcctgttatccgcctgcactgcaccctgttcgtccgcctgctgctcactctgttccacctgctccttctccgcgtagatgtcaatgtccggtatctcctgggtcccattgctgcgctggtacttgcgcatctgctgctccgtgctctccaccacggcctgcagtagctgcacgccgtcgtccacccgcttggccgtgttggccgagatcatgaacaccatcaagtacgcgccgtcaggagcctgcgcctgcttctcctcgtcctgctgctcctgctgcgcgccgctctcctgcgactgcgtcttcctgtagctaatgctgcaccgcgcgcgcgacatgatggcgttgagtttgccgccgttgacgccgatcacgtgcggcgcgaggcgctgcggatccatggtcgtgcgcacgtgtaccatgcgcccaatgggcttctttccgttgatgaccatgctcacggacggcgtgacgttggccgccgcagccttgagcgccgcggactcgcgcgggctcggactggggctgcgtctcgcgggcacgcctgaagctgttgctgctgctgtgctggccgccgcgcgctcgctgcgtccaggattcgagctatagctggccgcggcgctgcgtttcttggggtgggacgcgccgccggccagacgcttcctcgacgtcttcttgcggctgttgggcactgcggaggacgaggtggctgcgcctgaggacgcggacgagcgccgcgctgaggtgctgggtgagggcgtggtggccgcgggcggcgcgctcgcgcgggcctcgcgcacgcccagcgaggcgcccacggagattacgcccatggtctctagtggcgggcacgaagaagtggtgaatagcacgctagagcgtgaatagtgacttcccttggttgaatgacaaacaataaaattcggggtcactctatcgagataagtcactattcgtgtctgacgtggcggagccgcttttggacctcacgtcccactgcactgcaacactacaactttagcagccatgaaggtggcaacgtgcgcggcgccgaccaacatcgcggtcatcaagtactggggcaaggacgacgtggcgctcaacacgccgctcaattcgagcgtgagcgtgacgctgcaccaggaccagctgcgcaccaccacgtccgtcgcgggcggacgggagctgcagaccactcgcctgtggctcaatggccaggagcagcccatcaacaagcgcgtggccatcgtgctgcgcgagatgaagcagtgggcgatccgcgtgcgcggcagcgacagtgatgcgacgcagcacctgcacatcgtgtccaccaactcgttcccgacagcggcggggctcgcgtcctccgctgccggctacgcgtgtctcgtggcggcgctggccgagttctacggtctctccaaggccgacgaagagtatcccggccagctgtcggccatcgcgcgccagggctctggatccgcctgcaggagtctcgacggcggcttcgtggcctggcagaagggagagcagcccgacggacgcgactctagcgctgtgcaggtcgcggacgagctgcactggccgggattgtgtgccgtggtctgcgtggtgaacgatgcgcagaaggacacaagcagcaccaccggcatgcagacgaccaaggccacgagtccgctgctggcctaccgcgccaaacacttggtgcccgagcggatgaagatcatggagaaggccatcttggagagggacttccaggcctttggcgcgctcaccatgcaggatagcaaccagttccacgccacgtgcctcgacaccacgccgccgatcttctacctgaacgacgtgtctcgccagatcatccgccttgtgcaccgctacaacgagcaggctggccgcgtgcaggccgcgtacacgttcgacgccggtccgaacgccgtgctcttcgtcgaggagcagcatgtgcaagaggttgtgtcgctggtgcaccactgcttccctacgtcgcacaagatgaccatcaagtcgtcgatcgccgtcgaccgcacgccgtctgcagcgcttctcgcgaagatggaggcgaaggccgagaacggcaaggccttcaacctgccgcacatccccgacagcgtcaagatgatgtacgtctctcgcgttggcggcggcacttgcgtactgcctgcggatgaagctctggttgacgctgtgactggcgagccgttgccttaccgcaaggaaaactcgacggagagcgaggtgcgcggctgcccgctgttcaagcccagcttctggctgccagaggagccggcgctgcgctatcttgccactgcagtcgcggccgctgcggtgaccagcgccgtgttgctgcgcaagtaagtggtgctgcagtactaaacctccgtctcagctacgaatgaaatagagtgccccgcacacgtccaggcaatgcctggcaggcatagaagacagaatgtctacccagcaataaaattgacccttccctttctgttactttgccgggctgttcgtcagcccaagctgtttctgcaccaggttgaccaactcgtcgtccgtcaggttcgcggcctctgcccacggtggcggacgcagcttcacctgctgcatgctctggatgatggccagccgcttgtcctcctgcagcgctgcgtcctcctgggcctttgccgctgtctcagcttgtccagcgtcctcttcgttctgtgcattgtcctcctcgtagtctggggacctctcggggctctcggcgtcgctgtcgctgtggcaaggggacgacgggagcggcgcgtacccctcgaagcctccgaccgccgcgctttcctcctcgtcgctatcgctgccggcggattcagcgtcacctgcctggtgctgagacgcctcggtgggtggagctggtggtcggctctgcgcgagcacggccgcgtactcggcctccagcaccgcgagcgggtcgaacacgttggcgggctctattttggcagaatgcgctgattggctggaacgggatctgtgttggatacaccacacgcgccgcttgaagatcgccatttcttgacctcgaggaatcgttttgacaagagtctccaacctagttcaacgccgtcaaaaagcgtcataactacggcaaagcgcgcacatgtatctgcaagcaggagacggacatgcattcaatcgataaaatacaatcgctgctcgacggctaaatgttgttcagcagtgggtgtgcgagtagatcgcgtgtcaaagggcgttgacttggatcacgccgcagcagcgccgaaacgaggttgcacgcgtcctccgagatgaaaggggacatattccacgccttgaccacgcgacggacgccgagctgcaggaaggcgacgaagtcgttgtcttcctccgaggctcgatgcactagaggcgaccccgtcagcatgatgaagagcacaacgcccagcgaccacatgtcggcggcgaccggtgcatacgtctcgcccgccaccacctcgggcgccatgtagttggtcttgcccaccatttcagtgcacatgcgccttgcatcggtggcgagtccgaagtccgagagcttgcacacgccgccacgcaggagcacattctccagcgacacgtcccggtgggcgatgccgttcgagtgcaggaagtgcaggccaagcgtgacctgtcgaaacagccgcagtgcctcatgctctggcactcggccgttcggcgagccacgcactcggtcccaaaggtctccctcggagcagtgctccatgacggcgaaccaggactcgttgtgcaggaattcctggcggaagtggacgatgttggggtgcggtggcagcgccaacagtttggtgatggcgcgccgctcgtgccacgggttgtcggtatttggttgcacggcgagcagcgtggtggccagctcgagagagacctgtttgatggccacgagctcgtcgtcgttgtgcgtgtcctcgcaggcacagacggagccgtagagggcgtctccgatcttgtgcttgaggcggtagcgctggcggatcatggcttgtctggcttggtggtgataagtgtgggctgggcacaactcagcttgtttggttgttgcggaccaatttaggactgagctctaagtgcaatgtggggcgatgcatcgagtccaacttcaaagttcactaccaaaagttcaagagcgacaggtgagtcagtcggcggtggcttctttcagcggttcgactcgaaccgctgaaagaagcctcgtcgaacttcgacgagttaaaatactgtacgaggcacgggcaagatacgtccagtgtcttggataccgacggctagggcaccgaagcttcacgaagttgacctcttcagcggagcactcgtcttgcgcgggcatgcttgcgatcaacctagcgagctgctggccaagcactcagcatagtatttttgttcatgcccgttagtccgctacgcgagctcgttacgtatacaaagccgttccagcaacaactacgagccgtggccacagctgagatcgccggacactcccgcgcgagccagcatggcgctggcgccctgcccgtgccacctactgcacgattggatcagcggagcacgggtgtggatgctgacgccgcaacagctttgcactgcgttcactaaacgcgaggcgtaaatgcgttggccctctttgacgaagatactcgatgcattaactcggtagttttgctcctgcttacaggagagactgcacgtacacaactttcagcctgcagcgcgttgcaggaagcgtgtccagagcgcctgttgcgcgcagcggccttgttcaaagcttgagaaaaagtagaaaagacggagcttcaacgtcccgccagagaaacgcaagtcgtcatctccagcacactcccaatcaaattacaaggagcagcaaacggataagcaaagcggatgaaaacaccaggactccacctcgccgaggtggagtcctcgcatcgcgacgtctgcatctacataccacggggcaaccgggcacagcttgcatacgctttgaaatctatcgtagcagacgagaccagggctccacgagctcagaccgcaaatgattgcactagatccaccaccggcggcgcaacgatatccgctgaccggtcagcacggcttatcccgtttgcttgctcccgagcaaattgctcagcgttcgcgtgtttgggctctggctatcaaatacagtacttgcactttgttgccagtctcgccatgctggccctcgttcgtatgttcctgtggcggagttagtttcgcaacggcaagatccatagcgaagggtctcctgccgccagcaggcaggagacctcacttcgagaaaacaccgctaagcaacaaacaagttaaaatctgctttcatcgacacggcttgtcgctccgtcgaagtccgtcaagccgtccaactcccgcttcctcaagctgcatcgtgccaccgcacaatttggggctttctctactaggttgctcattcaggggagagggccaccatatttgcaacattgtagccttccacgaaggttattatgatgaaagcagatgccgttgaagactacaacagcgtgggtgaggaagaagcgaggaagaagagctccgagccggtgagatcgcgcaagtgcgagctgttttgggtagaaggcaatcaacgatctacaacgagaccaaagtctcatgctcgactccgtcacgaagttcgccaatcgcaccgagcgccggcaacaggacaactacaaggagatcagggcaaaccaggagctgctgcagcaagtgatcgagcagcttcaagaatatgcgcaccaaaatgaaacccgacaaagtacacaggaagctgttatcacgcaactccagtcggaggtggctaccttgcggcagcaagtgcaactgctatcggccaacacgaccagcacggggcaacaagcagcaagtcctgcagtcacgatgccagctgcaagttctgcaactcctgtagtcacgggcatggacgagaattcaggtgcggagtgggtgggcgtatgcctcccaacacgccggtctacgatagaaaagagctggagacacgactagcgacttgcatccgacaacatgaagctccaatttacagcggtgaaacaagtgaggatattgaagtctatgtcctcaatatgatcaagtggtacgcagcgatcggcctaaattttcatcagcaggtcgattatcgcgtcggagaacttatgatgaaccacacccaagggaaagcaaaggactggtttctccgggaatatcacggcgaacagcgctggagccacatcatccgcaagatgaagcaacggttcgtgacacgctcccaccaagaagatttggtggctcaattctttagctgcgcgcaaggcaatcgttagttggacacgtacaacgatgaatttcgccggctagcacgcacggcaggcgtctctgagtacatcaagatacttcgatacaaacagggactatcgtctgtgcaactgctacatcttctcaagacgaagtcgttcgacacgctagacgagctaattgaagcctcgcgaacgctgaacccacgcgaagtcgctcgatcgaatgataaaagcagcaaaagcagcaagtccttccctccaaagcaggataagaagatggacgcagcaaagtgcacgtcgtcgtggtgcacggagaaggggcatactaaagagcgctgctggatgctacaccccgagctgaagccgaaatggctgaaagacaacaacaagaacaagggcaaaggtgctgcggctgtatccaaaacaaacgctgaatccgaggaaaagaagctgtggtctgttctcagcatgatccagagtgacattgcgaagctcaagggggatttaaactagctggcctaagggatggcgtcctaaggcccaacacagccactagtagccgcgagaattgggtctttgaccctggtacggcggctaattcgctctacttccagcggcgtaccgaggagaagcctctaccagcaacgtatttgataaaaaacgttagctgcgttcgtgaagacgagattcagattgcgaagacattctttgacgaaggtgctgacttttgtggagtttcaatggagtatgtggagaaaatgaactggggtcagtacgtaaaagacttggggttgatggagctgacctacgcaaaacggcaagacggaatcgattaaaaatcaaacgatcaagctgacagtcttcgtcgacaatatcccaggttatacagcggacttccagctctgtcacattcctaaccagtgcgaattgatgctgggcgtaccctggaagcgcgcgcggaatcctgttatcgactgggagacagatcgcgtgtatacaaaggaggagttcgtcaaagaagccctcaagcagtcatcaccgaagagcgagcacgtgggtagaagctatcactactgcaggcaattcgggatgacgaaggtaattaatttcaagaaagctgacaagctcgtgcggcagaaagacgtggatttcatcgcactcgtcccacccgagacaattaacgcactctaccaggaagtcctaaatgagcaagctgggagtagcggggtagctcacggagtcagcaagaaacaaaccgacaaagctcagcggcagcagacgacggatatggacagcttcaaagataatccagtgccaagatcctgggaactaagctgaagatggcgtcagctcaccatcagcggatggatggacaagttgaacgactcaatgctgtgctagctacttacctgcgtcactatgtgagcggcttccagaacgactgggacaagcacctagctctggcagagttcgcttacaaccgtcaatatcaagctacaatccagatgagtccattccgtgctgacttgggctatgaacctcgcctacctgctgatttgcacctgccagacgagcttccagcgacagcgaccaaatttgtggcagcccagcaagagattctgcgagatttacaagctaaagcgcggcgaggggcagaaaaaatgaaattgctgtacgacagaggtcgacgggagcagaagtttgaagtcggtgaaatggtgctgatctcaactcaaaatctgactcctgcgaatattggggcagtccgaagaaaatttgcggctcggtggattggaccatacgaggtcatcgaagttcaccatgacggatcggcgtacaagctcaatttgcctaaagaattgagcttgcaccccgtgtttcacaccatggtcctgaaaaaattcctgaaggacaaatccggtgtcagtcgcgacacgacccttccacctgtacgacttaaggatggttccgaaggccatttgatcgaggccatcatgggccatcgcatctcgaagaaaggtgtcgaagagtaccagtgcaagtgggtaggccgagacgatgacatcacgtgggagccgacagaaaatctgctctcggtgccaggattgatcagagaattccatcgaagagccaacaatctgccaagccgagcatcagcaagactcaagaacaagaaacaacaaggataacatcaagtgacatgcattcagagttacttcaattcagcagaacgtcctctctgaggggcctctatttgtcttgaagttaatcgagtttcttcaggtcgtgtggcggagttagtccgtttcgcaacggcaagatccatagcgaagggtctcctgccgccagcaggcaggagacctcacttcgagaaaacaccgctaagcaacaaacaagttaaaatctgctttcatcgacccggcttgtcgctccgtcgaagtccgtcaagccgtccaactcccgcttcctcaagctgcatcgtgccaccgcacaatttggggctttctctactaggttgctcattcaggggagagggccaccatatttgcaacagttccggtgtgaactacatggtgaaggcccttagcggaacaagctctatccaatacttcagtttgtgcggacggatcttggtggctttagctcccgtcccaaacgtggcgcaatagcgtcgcagcctccgcagcaccacgcccctcgacttgaggctcgagctcacatgtcagctcagagcagagcttcacgtccaagtccaagcagcgcccaagaccaagactcttggcccaagagctccgaatcggagtcaaacaggacgaggctgattccgaggccgaaagagttgccaggagccgttgacaaacgcagccagtatcccgtggcgcaggatcacccggcaattcaccatggaccggagtcccgagggcactgccctcacatgcgctccagaacaccttcgctgtcgtctacacattggcatccttgtcagaagtcctggagccctccgcagctttccagcttaaagtgaaagagttaagcccaagtccgagcccccgctgccgtgcccagccgatcctacgtcccgctgacggttccgagggtcgctggactgcccggcccgggttcagcgcccaaagcattttcgggcccagccaggacgcgcctgaccttgcggtgcgcgaggcggcgcacgttgccgcaagcgcgccgcgtctgcgacccgggccgcccgccgaacaataccatttccttcgacggccgcaatagcatttccgccgccgttagcacgaacgctcacaaccgaatccgcgctcgacggcgacagtgcagctcacagaagcgcacaaccgaccaacacagacccccctcccctcgccccagcagcccgatgctgttcgccgaccgcttccgtgcgcgccgcccgctgagcgaggcgctgtacgggcccgtggggctctacgaggacgcgcagcgcggcgacgagctggtggccatcaagcaggtgtcgctggtgcgcgcaatggcggcgctgcgccgcagccgcaacgtggacaacccctggagcgagcaccgcgtggtggcgcgcctcatggcgctgccgccgcacccgaacgtcgtgcgcttccgcggcgagttcctgcacgcgcaggacacgtggtgcgtggtcatggagttctgcccgggcggcgacctgtgggacctgctggaggccgcgcccaagaaccgcctgcccgagcgcgaggcgctgcagctcttcgcgcagtgcgtgcgcggcgtgcgcttcctgcacgcgcacggcatcgcgcaccgcgacctgtcgctggagaacgtcttctactgccgcgggacgtgcaagatcggcgacttcgggctcagcacggacgagccactgcgcggccgcggcgaggccgtgggcaaggcctactacatggcgcccgaggtggtcaaccaggaggcgtacgacgcgttcgcggccgacatgtggtcgctcggcatcatgctcttcatcatgctcacgggctcgccgctcacgtccagcgcgtcgcggcagaaccgcgcgttcggcgccttctgcgagatgggcgtggccaaggtcatcgactcgtgggggctcgcgtccagcgtgtcgccggccacgacgacgctgctggacaagctgctcagcctcacgccgagcgagtggcccacggccgacaagctagcagggcttctgggattggaaggtgttgaagtaggatcgaattctccatgtgagtgaataacgttattcgagtggaagtgtaattatcaagaaggactgttttccccgtctcactagttgacactcggctggatgccggacgaagtgtaagttcaccaggctgttctagcgccaaagctccattaaagtattgcgagaacagagaactctccggctgaactcaaatgagacctcgtagttatgtgcacgcgatcaaacgcagactgagaactgggtggccaagggatgacgactccatccccagtcgtcatctgcagcaggagtacgtatcgaggcagcagttcagagtgcccaactctgtgtgagagcctcgggagactggaaagaagggttgattaactgcttcttttctgaagctaacttacatcttgacttgcgctcgtgggcatgcatctaacatgtgactccaccttgaagttgttatgttgctacagcagacatggtcaacacaacaacttcaactttgacttgcgtgatggtgtggggttagaaagcgcccgcacgcctttgaatgcatcactgtcacccgatggtcttactgagttagtctacacaaacccgagccttagtatgtaacgatctcagttgctctggccctagtgagctgcttgcaaagtgaggtgcgttcaagatactttcgctcttatacctcccagtgatatatatgacagtcgcaaaatcaattaggagtaagatcgtcgcgcgctcgagctgctctagagcgaaatcaatccagtactcgatcaaaaagctcaccaaggcgccacaactactccagaccgacccagcagtgcatgacaaacaggctcgtcttccagcagaagatgaacggtaacaaaatttgtagctttgacattttgtgcgtcctctccggacttaccagcgtcacctcgagcttttcgtgcggatttgctcttcaagctcagtcctgaattggcaccgtaccgaccaacgaacggaaaccatcatgatccgccagcgctaccgcctcaagcacaagatcggagacgccctctacggctccgtctgtgcctgcgaggacacgcacaacgacgacgagctcgtggccatcaaacaggcctctctcgagctggccaccacgctgctcgccgtgcaaccgaacgccgacaacccgtggcacgagcgacgcgccatcaccaaactgctggcgctgccgccgcaccccaatatcgtccacttccgccaggaattcctgcacaacgagtcctggttcgccgtcatggagcactgctccgagggagacctctgggaccgagtgcgtggctcgccgaacggccgagtgccggagcatgaggcactgcggctgttccgccaggtcacgctcggcctgcacttcctgcactcgaacggcatcgcgcaccgagatgtgtcgctcgagaacgtgttgctgcgcgacggtgtgtgcaagctctcggacttcggactcgccactgatgctgatcgcacgtgcgtcggagcattgggcaaggctaactacatggcccctgaggtggtggcgggcgaggcatatgcgcctgtcgccgccgacatgtggtcactgggcattgtgctcttcatgatgctgaccgggtcgccgttagtgaaccaggcgtcggaaagtgagaccgattttgccggcttcctccagctcggagtccgtggcgtgatcaaggcatggaaagtgccgtctgatgtttccgaggaggtgtgcgagcttatgtcagcgttgttgcgatgtgatccagtggaacgcccgtcgacttccgatctgctcgcgcacccgttgctgctggagtaattggcgtccaaacgacccggtgggactgtgctacgcgactgcggtatggtgtagttggatacagaggtgaatgcggcattacacccgtgtcaatgctgttaatagtggtcaaacatggtttcacacgccacacataaattggtttggctaccgtgtctttttgtgatatttccccccgccatgctcacaatatgaatcatcgatgaaatccaacacgacgtgcgcaaactctggaccatgcgatacacgcagatccagcacatgttgaacacgatagtttgttcgattctttgaagtggtacacgtaggatgccggcactgttgccagcacagctcattcgcttcacttgcccatgcttctcggataacttgctatcttgctcgccgaatctgctcgcgccgcggttcaaagccatcgctgcgcacgaagcataagccttcttgccttgaagcatcgcagtaagtcgtatgatcaaatggcagacgtacttcgggacaagacttaatctgacgagcatgaaattcaccgcgtaaagtcacaggaacctgtcgacttgagacgccaaacatcttattctgctacgttccatgcacaaagtagaccaggctaagagcaaagcgaaaatcggagcctgacgcacgttagtctgccaagtcttgcttagtctccacgccgccacgcgcggcaagagaaatgaggctgagcgccgctcccaccgctacaagctgttgttcgaaaatctgagaaaaggtagaagcttcaacgtttcatcatgtgcaacagggtcccaattcaatttcagtactgcatcgtttgcgcttcgttttttatcttgcctttctaacctcccgcccactcgccaccaaacatttttaattgccccccccgcccttgcgcagaacgccacgcgcgtgagcagggagcggatcctgcagttggatcagagcgcaggtattccgcgcgtgatgccctcgtgcctccgtacggcgctgatagcgcgggcattattcatcgatagcggtttcgtgcgccaccagcgcctcggttgccagtgtggcagtgtccctatggtggctggattcaccaggaaacacttttgatcgcatttggcgcttgtcttggccactgcctccggctctcgcagcagcgtgccccttatggccctggagtcgagcatcgagtcttccagcatcaaccaaggtttaagcaaaggagattaagcggaacattgggcacgttatctacattcaattgacttgcgaaaacgtaagatggattctgcgacggtatcaaggcacaatttgattggctaaaagtttattgaagtgccatacataggtacagaggtcccgtgcagtccggcaggcaacatcgactaagcggtgactgcaacagtcgacagccgagttctaggcggcgacttcacgagctaccaggtttgtgtttgttgttgctaaatggctataaaacttacgctaacaactttggttttaggataccctgtacgccagcaaggtttgctagctttacgctccattgcactactgcgatcagctcgactgtactaacacgaatgtaaatgggtgtactgtttgattatagctactactagcttgccaatctcggacactcggattggcttgtgtgtccctgaggcttgggcggctgactgtcttcttcgtttcgctcttgatcggcttgtcggatgagtctcaaaacagttgtaagcttaagctgttcagctcttcgcttacgtttgcttggctttaaccgcagtgtaccgtatcctatgttgaaaagctcaatagcgtgtttcttgtcacggatttctggcataggtgcgtccagcttggcctcgatcccattcataatgtgccgcatcataattgaccattctgacagcgtcgcttttatctgcggtgtatccaggtcgtccgatggtattcctttgtacggggggtagttgagctttggatttccgaaccaccatagcatccatgccccaaggggatcgatactcggaaaactaaattctctaggtagcacatgaaatttcccgccccagacatgatactggtgcactggaactggcgctggcactacggcgttgatcgacggacgttgttggagcccaacttcgtctaacaacgatcgaatttcatcacgcaataactctctcgtaatattgcccgctgtcacaccctttttctcaagtacatgctccattctctgccccagtttgccaggcagctcatcaattgacctttgctgctggtcaagcttcttgtatagctcaatatagggcggtatccccgttggtcgcatccagacagactctccagctactagttggccttcaagcgtcctaaggacagtggggcttgtaaaaaaatgtgtcgaaagtaatgcatgggtggccggtaaatgctttgcaaatattgcgcgtgatgcacgagtgatgctaggcacaaccgcaaaattcctgccatattcgcttcgcgagagagaaccggaaacatagtctccacgcacgatttcacatttttatcggggccatcctgaaaatggggcggtaaagtagcgaacttagagtcatttacgggaagtcctgccactactcgccccaggaattgatcccctgcggcttcataacggaaatagcgatcttgaactccaccgaggctccgcagcgaagacacacactcacgatcgagggaccgcctgtacttcctccacaagcgaatgtagccactcctttgcgcaccgagtgcgtaccgtaacttttaccagcgtctccttgcttcaaaaggttagtcagcaccttgctaaatcgtagcttctggttagagcctggaaatagtgcccccggttccaatcgagggtggcatgcaagataaattgccaaggcagtcacccagcacgttgatgggctcagcgggttcgcgtacaggtggcgtggatcacggggccctgaaccctcctggttagtcttcgtcttcacaaatattactccaacgctatcatctttcgccacgagatgctgactttggagagtctggaccgacattgagcgacacatcaaattccactgcgaagtaaaaaaaaagatgcgaaaacccgccatcacccgccacgagagtcgaattgcacaactccttataaagggagtacgtgagtggctgctttcctgatgcctttggggtgctagtctggtcctgatcagcctccatccgcttcataccggagaacagttgcttcatatcatcgtcgtactcaggaggcagcgccacgcgcttcacgcgataaagatccttgatagcacttcggtacccgctcagcgtagccgtcttcacagaggcgctcttgaacaccagaaaacgctcaaaaacactcggtgtaaactcacttagattaatgtcatcatcagcgtcgaaaaacctggcgatgttctcatcctccttagcgagctcgctcctgatccacttcttaatcccgttgaggctgctcttgtacttttctcttgtttgcttggtgacgcatgcatcgcgtatcgcctcgacgtcagcatgactggtactccgcgctggagcaaaagtgtgttgcgagcctccatcactcatgttgctgctgggtcgatgttctttgtgtgttgctgtcaaattttagccaatgaaggacttgatgtaagcgtcggcggctcccgcttacgtttgctcagaagaactggatggcaacagtcgcataatgaaagccagtcaaatcccgtgaggaaaaaacatttcctgcaaaatgtcagctgtccacgccgacgacttcgcaggaacccctatatgctaccagtccgttccaaatctattgatatgtaccactatttagcttgttcctaaactataggaaaatactagtactagtttcactatggccagaatctgcagatcgatcgagaggaggcagaaatgaggcagtagtaacagagcacttgatgcaccgtggaagtcgtccctcccgcgcaagcttcgacttcgacatgtgtcgaatcttgaatgtgttgtcaccaccagcagcaacacaatcgttcatcacgcattggagcgtcaagaagcccgcgtccagtgttgccggcggcagctcgtccagcgccaccttcacgttggccaccaggtcgtcgagggtgtgggcggccattcgctcttgtcgcgactgtagggcgttgaagacagcaagatccaatacgttcatatcagggctgttaggcggttggaaccgcaagtgtacatcgcacccggaggcgtttactgcctgcctccacgccatgtcatctggctggatatgcggggaggcgttgtcttgctgcacggtgacacgcctcccgtccgccgcacccggaaactttgcttggatcgacgggagcacgtgctccaccagcatcttgcggtaggtctccttgttgacggccaccggatatggcaccagcgttccagcggggcgattgcgactgcttcgtttcgctggctcgtgtgtcaaaaacgcccagacccccagctttccatcaaataacttgcccgtgatggggtcatggcgcgggcgggctactgctgctagcatcatcacattgggaatatgacgcttgctcttgagtcgatgcacaggcttgggctcgtccggtagaagcacgaagcgacgcttcaccttgcagagatagaaaagtttttcatccacgtggactacatcttccatgtcactgaaatgatgcgttgctgcacttacgtgccccacaataaatgcaatcctcgacttcttgttgtcgtccgacagcatgggcttggcaacggacgtctccacacggagcttcccgatgctcacctgtcggaacagcgtggttggtgggaggaaacaggcttgggcaccacgcggtagggcgccgactgtcgctcggttgaggagggccgacaccacgagggcacgttccgcgtccgaaaggtgcttggtcttggggtgcgaggtcttgttggggtgcgacatcgagtagcttgttgggtttggtaggtgggtgcttggtcggggaggggcgaaatcgttaatggcagtggtggcttcttcatcgatgaaagcatcattggagcttaagcgcttcccctggcgccaatttttcgagctgtgcggagctctgcacaccagtcaaaccgctatgagcaggcggttgcattactaccaatcacacgggcatacaactatttttaaccaattgcgagccaaacgtgctcaaacctccagtagatctggaacggactggtacttacgaaagcgaaggaatcatttattgctacgctacgctatatatagtctacgtacagctctatcagttcgtcggccgtgggccgctcgctcggcgtgaggctgagcagcttgtccagcagcgtcgtcgtggccggcgacacgctggacgcgagcccccacgagtcgatgaccttggccacgcccatctcgcagaaggcgccgaacgcgcggttctgccgcgacgcgctggacgtgagcggcgagcccgtgagcatgatgaagagcatgatgccgagcgaccacatgtcggccgcgaacgcgtcgtacgcctcctggttgaccacctcgggcgccatgtagtaggccttgcccacggcctcgccgcggccgcgcagtggctcgtccgtgctgagcccgaagtcgccgatcttgcacgtcccgcggcagtagaagacgttctccagcgacaggtcgcggtgcgcgatgccgtgcgcgtgcaggaagcgcacgccgcgcacgcactgcgcgaagagctgcagcgcctcgcgctcgggcaggcggttcttgggcgcggcctccagcaggtcccacaggtcgccgcccgggcagaactccatgaccacgcaccacgtgtcctgcgcgtgcaggaactcgccgcggaagcgcacgacgttcgggtgcggcggcagcgccatgaggcgcgccaccacgcggtgctcgctccaggggttgtccacgttgcggctgcggcgcagcgccgccattgcgcgcaccagcgacacctgcttgatggccaccagctcgtcgccgcgctgcgcgtcctcgtagagccccacgggcccgtacagcgcctcgctcagcgggcggcgcgcacggaagcggtcggcgaacagcatcgggctgctggggcgaggggaggggggtctgtgttggtcggttgtgcgcttctgtgagctgcactgtcgccgtcgagcgcggattcggttgtgagcgttcgtgctaacggcggcggaaatgctattgcggccgtcgaaggaaatggtattgttcggcgggcggcccgggtcgcagacgcggcgcgcttgcggcaacgtgcgccgcctcgcgcaccgcaaggtcaggcgcgtcctgctgggcccgaaaatgctttgggcgctgaacccgggccgggcagtccagcgaccctcggaaccgtcagcgggacgtaggatcggctgggcacggcagcgggggctcggacttgggcttaactctttcactttaagctggaaagctgcggagggctccaggacttctgacaaggatgccaatgtgtagacgacagcgaaggtgttctggagcgcatgtgagggcagtgccctcgggactccggtccatggtgaattgccgggtgatcctgcgccacgggatactggctgcgtttgtcaacggctcctggcaactctttcggcctcggaatcagcctcgtcctgtttgactccgattcggagctcttgggccaagagtcttggtcttgggcgctgcttgcaagcggctgggcggtggtgtgatgctgatgacaatctgatcgagctgacgttgccatctcgcccgatggttaacatgctgtaagcaccgtctcgctgccgatcgcactccgtaccggcacaccggtcttgtggactgcagcgcgcgcccgacttggcctcgcctagattcttgccgctgacgaaggcaaggctttctttccgcagcgttcgtctgcatccgtttcaaaacgcgtggccaccaactcctttcttgcgtcccagcgcgtgcggcgccttgctcgcaccaagcagcagcaggtggcgacccgcagcaaggtcaccaacctttggtcacgaaacgcgcccatggcgaacgcggcaaagcgcaggtggcacctcccgcgtatcagcgagccaagcaagctttgcacttcaacatcgctgccgcaacatctgcgcaacgtaagaactgcaacttcacctgatccaagatcacctattaagcagcataatcctttataatcgcatacccgagcaatggtgtcgctttccttctcttgggacaggttcacgagtactcgcattaggcaagaagaagacgaacgggaggtgacgaaggaggagaaacatgccagttcaagcaacagaggtactttcagatgaggatgtccgcaacatcttgaatgggtggacggaactcgacccggaacatgtcgacctctacgtctcgagcggcgtgggccggacgctgatccacctggagcggagcgggttcgagtgttctgaagaagagtatttgctgtgtccggatacaaacaacgagccgtcgaaggcgtatttgcatggtggcaacttcgcgctgcctcctggaacccccggccacactccgtggccaggtcattgcgcgccggctgatggaactgcgttggctcacttgcccgcagatgtggatgcgtcccctcccttcgcactcggtcggttcatcgtcgagcggatcgccaccgcagtggacctgacgaacgggacaagcttggacgtgattcttttgccgaagttgggggtgttctcctacatttgtattgctgtgcaggattcgctgcagtttagacgccggggcgttctcacggccgcggatttcggcgttcctgtcgagcctcagttggtccgcgcattcctccttgggaatgtcaaggagcatccggacaatcaagtacactttaccaggtgttaagtgccgcgactcagagcttcattcaacgttagttggggagctctaaggttggaagacagcttccgcgcaggaatataagccatggctgctgctttcacgttttagtatgctgtcaagggcaagtcttccaatgctgtagccctccacttcaacatccttgctgcaacatttgcgcaacataaactccaagcccccctttaactcgcattatcatggctagattacttccacccacacctagactacgggcttcaccgtgtgagcaggttcggacctcgagggcccccggactcacgctttctacgagctagtcatctctacgtcgaggccgccgcaaatagtcgggtcttggccgcccatgtgcgagctcttccgtgacgagcatcagattgcgggccgcattctcgtcgcggtcccagtacatcctgcaggtgctgttggtacagtgcaggacgttccgggaccttgtcgcgcgagggtgtgctggcacgccgcgtgcttgaggcgctgggggcgggggctcctcttccggctcggctcgtcgtcgcctcccaaactccgtctccgctagatcgctgtggcacgcgaagcacttcttgctcgtgaagtactcgtcgatcaggcgtacggtagcgcgtctggacagctccttctcaaagcccttcagcgggggcactgcgttgccgcggaggcctcttgggttgttaaactcgccgacaccgacgagcgtagagtcgtcgggcacaggaaccacgcgagctgccacgtagccgagcgccttgaacttgtacacgtagtttcggaatcgccaccgccgaaacgcgtgagtggagctgaagtcgatcaggaagttcacgtgtttccagaagtaggagagccacacccagtagtcttgcgtcgaggcgcaccggaaggagggcatgtttgcgagtagtgctgcgtacaccggctcccattgcttcaggttctcgaaccagtactagcggtggttaaacccggccagatgtcggtactccttcgtcgagcatgacgccgacgtgacgtcatgctgccgtgcgcgtccgtgttgctgcttgggtcgctggtgtcgtcgaaattctcgccaggtttccggtccgttcaacgcccgctgcttcagcttgagacggggctgacgcttcctgcggcgccgcatccggagcctccacttgggcgacgcagaattccgagtccgcttgatcttcctgaagcggtaaaaacgtgggggtggaacgtcgcgtcagcctccgtacgccttgatgccgtagcacacatgttgcgtattccagggtcgtctccgatgatacgcgttggccgatagtcccgaggaagccgaggttgaaagtcgagacagtttgaaagcggggggccttgtctggggttgagctcgcgagtgaggtggatgcacgcttcgtagccgttcgtcgagatgaggtggtcaaaccgccatcgccctgtttcgaacttgcgagcgttgaccaggcgccgccaggcttcgtctttaacttcggaaaactcggacatcttggggtagcgtagagcaccgcgctccgttctgcgcatgaagcctttcagagggtccaggtcggggcgaccttgtttttttcaggtgttcacgcagtcgatgccaggtatccagtaacaccgaagtcgagatggccatgtgaaccggtacgaactccgtggtgagcggcagtagggaaaacagccggatgccgcggcgtcgctcctccttatcgtcaatgtgggccgcgatatacttcagcatctcgtactgacgctcgaagaagtaggctttatccttctcgatgtttttcgcagttggctgggttttcagaaattcgcggaggtgggcggcagcctcttgaatcggaccggacacgccgccgacgaattcgtacgcctccttgaattgccagtacatctcgctgttcgaggcaatgttgaagcgaagcttgcagtatgacaccgtgcgcttgtagtactgctccttcagcatgaccttggcgttggtgagcatctcctcggccatggcgttttttgacgcgctccagttagcaatacggggttgctcgtagcctgccgtctccgcgcgagagttccggtactgcacgatggtacggtatagctccgggtcctcccgttcacttgaagccgataaatgacgtataccagccccggatagacatctgtcgaaatacgtccgttctaaagccggtagagggagatcctcttcgatacaccgtagaaagtgtagattgcttagtcgggacccctccatccagatctggtgcagcgtacgcacgctccgctcgatctcggcaacgaattcggcgatggcggctttcctgccgtcgtcgggagggttcacgagcacggaagccagcttgcacttgactatcgtcacttcagggtcttcgcagagatgagtttcgctcagcaggaagcacacttcctcgtaggccgtcatgttggtccgttgtcgtttggtaggccgcagcctaggcccgggctcgccgcttgttgcgggtgcggggcatggggagggatttgtagcgtacgcgaggcggtggagtcttgagtaggcacggaggcgcaaaaggtgaagtgggaacgccgggggcgctcttcgtagaagcatcgcgctcgcagcattcgagggctacgcacccttaatgtgcggtgctgatgtgggtgagttccttccaccagggttatggacccttaatgtccaaccacggcaccgacaacgaggacgagttcaaggcctttatcggccaagtggacgatgacaagagcgggggtatcacatacgaggagttcctctacgtgttccaggagatcaagctggcgcagctcttcagccaggactttgtcgacgctctctcgaaggaatacaccaaggtctacggcaacgacttgccggttgcaaggcggctcggatcaatcgagtactcgcctgaccgcattcgcagcgcgtacacgaccgaaggcgttgagaggttcatgtactcgaagcggccgaactgggccagtgtgcggtggatcaacgtggaaggaacggacccactcatgatgcgccgcctggcagtgcgatatcgactgcacccactggcagtggaagacacgctggacgccgacctggagcgccccaagtacgagcactacgacgaagactcgtctttgatcctccaaacggttcacgcgcgtgatctggagaaggcgctggagtaccagagcatgtatcgcgcgtcgctgtacgtccgagacaatgccgtctccccgtttgaaggtatgagcaaggctgagctggagaggagactcgatgaactcgctatggggcgcatcatggcgccgcctgaacagctgagcttgtacattatggacaacgtcgtcattagcgtccaggagtcgcctagcaccctgtggccgactctgaagcagcgactagacacttcgtactccaaggtccgacagaacgggacggcgttcttggtctactccatcgtggacgtgtgcgtggatgagctttcccccatcgcccacacatacggagccaaggtagcgatgctttctcgccttatgtgccacgatccacgtggcttcgacgtcgatcggctcgcaaaatgctccaaggaaatcaagggactcaaactattgtgcaaaccactacgcgagatgatcacgcagctcatggagtccgacgattttgaaggcgagacgttgcggtacttccgggacgtgcaggaccacgtgacagtcattgacgagacttgcgaccgcctcctggaccgctgtcggagcctggtggacgacttccacaacgtacgccatacgaagtgagctacacgctgacgctcgtggccaccgtgttcctgccggcgcagttcctcaccggtctttacggcatgaactttgtcaacatgcccgagctgcagtacgagcacgcctacatgatctggtggggcgtcgtgacgaccatcgctagcgggaccacctcctactttaagttctacaagaagtggctagagtttgatcaaattttcgcagcagcgacccagcggcacgtgacccgtgcaccattcgcgagcaacctagcgctttgactaacgtgagctcaacgcgagcgtgtgaaatgcagataccagttacggcgtgagatttccgctccttgcaatgcggtggtggctgatcaaggtgaccatacaatcatcaactcctgtttgcctaccaacttctccgcaaactgaccaaggcacatctcggtgtggagcgcgtccatcagtgcgactgtcaccaaccgcattggacagctgcacatgcacaaactccatgtttggagccgcttggggcttcaagagttcagtcgagctgcctggtgaattcgtggacgggagcgtgaatggacgcctccccgatatacattaacgggctgtcatacctgcagctgatatgcagcgtcatatacgcacatagatctcgcaggacgcagatatcgtctcgataaactgccctacccctagatatatgccgtgtagccatcataaagttttgtcttgttgttagtatactttatgctgaccatcattctaacatatgcatccttcactctacgggcatatcgatgatcatatatcttccgccaaatcgaaaagacgctcagttgcgaatttgccgccggcggcgcgaagtcgacagcagccaacacttcgaaaggtgagcgtggttgatggctttgtatgcacttctctatgagaggactcacctcgtgtttgattgcagggacaatggtgcgcttaacccactccgccgtttactggcggcgtcggtgcatcaatgacacgtccagcgaggacgaagagaacacgccgccgaacatccagcccagccaccagtacgaccgcgacagcaagcgccgcatcgaagacgccagcgagtccgccagcgctacgggcacagcaacgcctccgtggctgccgccagagagaagccgccccaagtccaagttggcaacgaacccgccgccaagccaggagtcgacgtctgcgcccgtgtcgccgccggtgtccagccgcccgtacgccagccccaccacgtcgtcgccggtgctcctggagacgccgccgagatccccagcggcgcttcagcctcgccacgagggccgtcgtgcgcgtcgtgaagctgccgcgccttacgctcgccggcagtcggcgcctcagcgcgatgcccgacccgtcatcaacccacgcgggtcgatgcgagtcactgcggacggatagcctcggacgcaactacgggggccgcggtcacgggatcggttcattccagcgcagtggccgcaccgcgtgattcagcttcgcgagcagttcaacccgctcgcgacggtatttccgtcggtgcctcatgcgactgcccatcgccgtgccgtgtggactcctgccgcaattcgctaatgcatctctactgcaatatcaactgctgcccgtacgggggggctctgtggcaacgcgctggccgagtcgagcaaggtgtatctagggaggaacgtgcgcacgaggtcgttgggcgtggtcgctggcgaggacatcgaagcgggcgaagtgctggggcaatacctcggcgagatggagcacttgagtgtttcgcgtacgacccgaccgcgcaatagcggctaccgcttggtgatgaggcagcggccagagcgaccgacgttcccagtctgcgtggcgatcaacgccgagaactgggagggctgatgcgcttcgtaaaccactcgtgccaaccggtggcgaagttcgtggaagtggccaacggccgccgtaccaccgtggtcgtggcgtcgacgcaagacattcaccgcggcgaggaggtgacagtcgactatggcgacgacttgtggtttgtttgccgctgtgggctggatggctgtcgccaccgcaacattcaagacgtccaagacccgtgagagggccaaagagtgagcaggacgagagggcaagcaaggtgaagagagagagaccagcgagaaggggggagggagcgaagtgaaggaggtgtagttgtgtaggtaagcgtgttgtgaacaaaggaattgcattgagataacatattgctgtgcggttgttgatggtggttgccgtgagtgcaaagtagctgcaggctagcaacaagcagggaagcatgaaaaactggcgccaaggttcgcgccaaacgacgggttgatgggctcatcttcgttcgaagttttcacgtacattgacttgctatttgcgcgcgcagatttcgcgcgcgcagcgttgaagttgtgagctactagcatcctttcaagatcgatgcgaactggtggcggcgaaggcatcgccctggcaagctgccgccgcggcgaagctgtcgtcgtctctcacttctggttttaccacgttccaagcagttctcccccccccccaagcgcgtctccgccgcctcgcctccgcccaccactcccggtacgccgcgccaacacggtccaacgtggcaatgagcagcgtgactgactttttattgattcgtctgtgtgtgtagatgcccaagcactctggaacccccaactactcgacgctcgtcgagaagatgctgccgctcggcagggacgagtgggaacacctcgctatgacgtacaacgccaacaggcctcgaggctcgcccgagcgagacttcgagagcttacggcgtaagttcaaggtgcttcacagcacccggaagccgaccggcgtgcaggagattcccccgctcatcaagaaagccaaggaggtcaagcgtgccatcgacgacaaggccaacgtcgtggagacggacgacgaggccgacaacgaccagcccgacttctgctttgaagtcgacccggacgacagcttctacgagggcggcgacggcgaggacgaaggtttgggagtgcccactgccgccactgtgggcaggtccgactgcagcgagtcgccgggctccgacgagtcggccgaggacgagtcgacggcttccagccgctcatcgagccgaggcgcgttccaagacttgctctcgtcgccgctgaccaccgatgatctggacgagcttgtacgcacgccgcgtcctgctcctgtccgagcagcgccaagtacacgtcgtgttggctcgggagggctgccgccaccacgtaagacggctgttactgcccccagtagtgatgcttcacagcagccatcgactcaaggtgccgccgctgccaccaaccacgatgccgccgaagcggccaagtaccccaagctccacaagacgtcgaaccgtctcggaggcgtggacttggctggctttcgcgacacggtgggcgccaagcacgctcatgaagaagacaaagacacggcggaagctagctacgccaaagctaagcgcacccgtgccatgaaggcaacaacagctctcaagacaaagctggatggccttgaaaacaacgccagcaacatgcgaggaggcatccccgagacgcttctgctgctccgcgaagagatcgagcggaaggctgacgcccgtcgcgccgaggaagatcagcgccgccgcgacgaaaaggcggccaacgaggcccgccttctggaagccaaggctgaagctgaggcgcgccgccgtgaggagaagctggagagagaggaccgtgcgcgccgtgagcgcgaagatgcgcgcgcccgcattcaagagctgctcatattgatcggcgcactgactaagaaggcgtgagcggaaggcgcgcatgctcttcgaagcgaggcaatcattcacgttctagttactatatacttgtcacttaccactatgcctcaaatcaaacatgttgttcatgatccactagcgtgtccgccatgggttacgtgatcttctagcgccttcatcatcacatgtacttctcgtgctgcgtacacatctctgtgaagtcaagtgcaagacgcacgaacatcgagttcggctctccgtcgcaaacgtttgcagcacgctgctgccagcaacatcgagataatgaagcagctcaattcaacggcaaagaaaaatgtattgttgcatgcagtacaaacacggctagttcgacaccctactcgctggatagctccatctcgcctgaaaacgtcgtgcgtatctgcgagatgccgatcgtgcggacgcgatagttagccattctgaagatgttgttgattcggtgtccacgaagctcggggtcgtacggcagggggaggttcaggcggctgtacaccttttgcatgctccccatgccccactccgccgcctgcctcacggacgtgatggcgttatgaagcgtccgcgcggagcttctcagcgacgggagaatcctctcgagatcgccatctttgagaggagtcaggatgcgaccgaccgtgctggtcgaacacgggaaggccgagtccgacaccacgttcatacgtgtgtccgggcagagggtagggtcgagcaacttggaatggaatcccaaggaggtgtcggagtcgttccacgacccggggcaattgtgcttacaccaaatgatgcagccgtcggctgcgaagcagattgtgccagtcacgaaaacggtgtgcaaccacccgttatacatggcgttctgcaagtccgcattcgacggctgctgaacctacaatatcattgatgttagcattctatcatagcaagtaacattttgcaaactacaactcacccttaagttcttcccatcaatgaagccgaatgtgtgtttgagaagcggctcgcgggcttccacaagctttgcgagttcggcttggcgagcaggctagggccaagagattctggcaggagcgtagccttttagcgccagcgacagcgcttcctcggcgcggcgtagcgtcctcgatatggtgctcggcggagccccaaacatcatacacagggagctctgctccatcgacccgacgtagaagcacagcaccaggtccaggatctggtggtagtgtcggagcttcgggggccgcccgcgtgccgtgctgcgtgggatgtagtaaaagcggctgaagcgccgcagtagttggtggaaagccgacctgaaagcatgcatgaattagatatagcgcagcaacttcagatagtaagtagggtcgcacctggtcaagctcgtcgcgtttaggaagttgatgtcgcttccgcgcgtgtacaacatcatccacgcggagtcgcagggcgtgtccaggcactgggtggtcaggtagtgcctggtccgcatggcgatcctccacgcctcttccacgagcttgtcgtacacctccctgcgcacctcgtgcagcatctcctcctgctcgacgaaggcgctagccagcaccagcatcgcatcgacgtcctctgcggccatcgctccggcgcttgtgtccgacgcgcgccaaattcgaaactggtgaaatttagaagggatgcagcgtcggcggtgtccggaacgaaatgacgggtacattcttaaagcccagcaagcgtctatcaagccgcctgattcagggcgatatcaagcggacacaagtgacgcatgtacgacaattgcggtggagattttgagcactatgtcaatatatatctttttaagccctgtcatatctgctgcaggtatgacagcctatatctggtaggcgtccaatgggcaagtgctggtttactgaactcaggacaatgcagatctctctctctactcgctcgagacgattcaccatgaacccccaccggacgtctcagtagtaacggtgaccactatggtatcgcctcccaacgtcaacgcccaagagcaattttccacgagttgcttccggagtggaatgtgtaacatcaaagcacgctttcgcgccctcaaatccaccgcaattccgtccaaggaagtatcgaggggtgccccttgcacctcaaggatggtagcgcgcgttacgttactccttcatgtagactgaactcgatcgatcgcagtgtgtggccacggacagctccaccgaatccaggagtgctcttgtatcggcgttaatgcctcgttgcgtgcctcaactccgatgggaacgcgtgcgttcctcaaaaaccgcaagtgatctctcacgccacctcctgggacgactggccattctgggcggttattatccaattcgccacctcgatctcaaagaggacttggactctcaccatgccgatgcccgacttccgagtgcgctcgacgagtcggttcggaacgatcgacctcggtggcgcgagcagcatgaacagcgcgatccgaagcgttgcagcgggctcaaggcccagcagcaggtacttgagtcgccaagcgagcaaggcctcgtccagtagccaagacaacagcagacgcgtggtgcggcaggccatggtctgtgctgggagtctgcacgtccgcacgttcaagttgctctggaaacctgccgttctgcagctcatggtcaccaccaccacgagcttgagcgaggacgaatcgcacttcgacgactgtgacgatgactcggacgattcggacgacagcgacgttgagaagctgacgaccatggctcgacccaacaagacgcaccactactcgctggttttctgctaccggtcgctcatgggccacgcacgtcgagagcggatcgagctggacgacccccgagaccccgttgagttcgtttggggcgaggacggactgctgagcacccgattcgagttcagcatcgtgtacggcggtgttgggccgtctggacggcgccggaatctcacgtgccgcgcgagggatgccaaggactatttgcaatggacggaggctctgcgcacagcgctggagtgtcaagggaagaacaaggacatcaagatgaaccgctccacccacgctcacacggtatcgtcgtccaaggctccatcgaattctcgcggctcgatggggtcgttcttggacttggacgtcgtggaggagcaacagcaactcctggagagagaagcagcggctgcacgtaacaccccaacatcgcctactgccgctaccgccgccgaagcaattgcccctccagctgcggaaattgcccaagagtctgcactcaaacccgttccagtcgatatcgctgcggagtatgaaggtgctcgaaggcggccagtgagcatcgtggtgccagccccgcgacctgtgggcacgcgcctccagcgacgcaagccatcagtgcctcctatgggcacagggaaaccgctgagcatcgccccgttgcgtcgaggcagcgtcacctccaaggcagcgaaacctactgcatcgctgccacctttcggcagaccgcacggcagtggccacgccaagactgagatgtcgatgtctatgcctcctccaggaggacagcgacgtcgcagaaccagcagtgcagcaagacgactcagctcttcgtcattgaagtcacgcgcccggaagaccaccatttcggacaaagcgcacggagcgtggagaccccacactcccgacaccacaagcggatccaagaggagtcgacttcgagtatcccccacgtcgcagccagaggagaaacgtccacgcgtgcccagctccccattggcatcagctccgatgctgggggcgctgccgatgctgcagtctccctcgtcactcaccgactcgccgctggacttcatcgacgagcgcccgtccatcgacaacccgcgcacgaccgagttcgtgaactcgctggtcaagatcgcgggcgtcgcctccgccaagcagcgacagcagctgctgcagcgtcaagaatcgtgccctgtatcaaccagctacggcctgccactgatccctcgccagtccgaagagaaggaagacccgtggttcatgtcgcgccgaagctcccgcctcaacctggacgtgtgcgacgttgaggtcgaaaagtccgcgcgctccaacaggcaacggcaacggcaacgagagcgtggagacacgtgggcggcctacctcaaagccatggagtgcgagctgtagcattcgtttagtatttttgtgacgtcaacttcaacatgggcacgattccggaggccctccacagacagcatgtccacagcatgctttttaatggttgaattcgtatagttgtagactctctcactcaacgacgatgcatgaatgaattcactactcacgagccctgccgtcgtgaagcctccctgaacaggcttcacaaccttcacctgcttacctgcgcgacaggcagcttcaatcgacttgacattcgctttggctagcgctctgtcggtggttaccgtgcagctctcgttgttcttgggctttcgatcctccttaacacctagagctgcgaccgagatgttgaaggagccctcgattatgatgcgaccatccaaaatccacatcttcgagtgctccatcgcagaatcgagagagacgtagacttcgacgttgttctccagtaagtgtacgcgtacacgatgcgccgcactatctccatgtggctgaagtagcaggccgagatgaacatggagtcggtcgtgccgtcaataagctgcatcagaagcttgagtagcaagaccgtgcggccccaagtgcctttggcgggcgcgttgcgcagcatcagctccagcatgacctcgtcgtggtatcggcggtacgtacggggtttcatcttcaccgtgtgagcgatatccgcgaagttgtactcgatgacgggatcgccggccgtagcctcggtgagcttgtccgctagctcgccgatgttggggcgcggacggcccctcttcttgcgcggcgagcctcgtttgtcgaagcggtccttgacgacacgaggagaacattcaaacttcatggcgaccgcgtagcagtcatccttgctcagcgtcccggtttgcagcgccgagctgcccatgcccttcaggcacttcaacacttgctctgtggtcgggttgttggcaccgcgctttgcctacgtaacggctgtctcctcgaatcaagttacaaacaattcgtcggttttcaaacaggaattgctcggaatgaccgacgaaatgtttgtccatactaaaaccaaatcaaaatttgtttcgagtatagaatatgatctatcaggagcacctggcaacttacctaagtactgagtccttcaagaagcaacttacccaaagtaaaaagttataaagagagaccttttgaatagaatataatatatcaagaacatgacgagctcttgcgtattttttctcggataaaaaaaaactcttcgaagatcatccgcttaagtattttacttaaacgggatcccgtttaagttcctgcttctcgcttaagaaacgctgctaagctgtttagctgtgccattgtttggtgctgctaagctgtgcgtgcttctaaactgttgacaagatttcctataaaaaaaggggtgtctccgaaagaacgcgctttttgtacgcctgtgagaagccaaaagcgctgtctttacgacacatcgtttttttatgtggccaaattgtcgaccgactacacgaaagacagaaatatttataattgactacacagaagtaaaacaaaactaacttaaacgggtcgatgggactacatggaagtcagaaagttaacttaagcgggtcaaagtgactaccaggagtcagtaaaataataaacaatgattgtgtatgaaatccatttcgtacacaatcattgtttaaatcatatacactaaatatggatgcggttttaaatacggaatcgtgatgagcatatcccatatttagattgtctacattttgattcattcaataggaaagctcgatgaaggtgaacgtgtacgtcgcggtcggcggcgctgctgcgcgtcgcatctgctggtacatgggcacctcggacgcgcaggtagagcacgccatgcgcatgctgctgtacctgtctccacagacggcgttcctgctgcgagacgccgacggggacctggtcccagtgtcctccaccttgcccaacggccagcaatacacggtggtgctgcaagaagacctcgcgctggtgagtggttcgactagcgctataaataactcgatcacgtcacctgttcttaacgggggtgaggtgagcgtacctctgataacgcagacggagatgacgtcagcttcgagccccaagcgacggagactcgagctaccgacagaagcctcagcggcgtccccgatggtaggggctactacggtcattacaaccgctgcacaccagccgtcgactccgccgcggtcgatcgccacagtcattcagcagttcgtcgacacgttcaccagccccatcgccaacgacgacaacgtcaacttcatcccgaacactgggcgcttcgcgctctacgcgctctacagcaagttggtgcaggatcggaggttccaccccaaacgcgaagacgtgttctacaaaatgacgtccatgcacggcaaggtagatcgacagcgcgtgaaccgctactaccagtgccgggtggagaacggagtcgggacggaagtcgtgcactgcaaaccgcagggcaaaggagtgctactgcggcgatatcgcgtggtaattagtgttgaggagctacaggaggcggtgaagtcgacaccgtttgtgtctttgctgaggttagatccgaaggaagtggcggcgctgtacatgcgcttcgtggacagcttcaaccccattgccaagagtatctatcgtgcgcagagcagcagcaagcacggcgatagtgaagcagcagatgctgaacaagtagtgttgagagtgtaaatggttgcaaggcgtacgtttctttagtttgataagtccctgcaagtgatgtgatgtgtgtgtgtgttttctacagttcatccttctcctcgacaggctcagcctcgtcctcggcctccttctcggcctccttctccgtcttggactcggcgttatcgctgtcagcagcgtccttggacgaggtctcttcctcggccttggatccatccttctcggtgtcgttcttgtcggtcttcaccggctgcggcttcggccgcttcgccaggacggcgacgaacttcttgacgccctggaccttcttggcgacgtcagcagacgtcaaaacgggcttctcgtgcttggacgcagccttctgcgacgcctccgactccgtcagccacgcctccagctcgtcgagcttctcaatcacgtcgctacgctcctcgtccgtcacctgcggcttgctcgtgctccactcgttcatgagctcgcgcgtgctgaaggcgtactcctgcgcggtgttgatagcgatcggcagctccttcgactccgttacgcggaagaggatggcgctgaggtccgagtccagcgcgtccatcttcttcttgtactcagcagcatcgaccttgtcaccgtcgtcgtacagccactcctctgtctcctccagcttggtctgcagcgactcgacctgctcaggcaccgtcacctccttgatctggctctcctgagcggacagtgcgtcgtgggccttgtagatgaaggtctcgaggctgttcttggcctccaggttagcacggcgcttgttgtcggccttctccatctcggtcagcatgcgcatggactcctttttgacggtctcactcattggcagcacgctcatgccctcctccggctcacgggtctcgtacgcgcgcacgacggtcaggcgctcacggtgcgtcttcatctgcttctcgattctggtctccaccttctcttcctcctcggtatcatccttgtcttccgccttactgctgtcagcactggcgtcgtccttcttggccttcttgctcttcttctccttcttcacgggcacctcgacctcgacctcctcttcaagcgtggcctcagccttggcaatctgagcaataccgttgctgtccagctcgaaagagagggtcaccttcggctcgccgaggttcttctcagccatgcgctcgacaaacttctcgacgcccgtgatgttgaacttgctgatctgcacgctcacgccagcaggcagcatggacggcttgtcgtagcggaaagtgcaggacacgtcgttcgagtgcgagaaggacaccgacttgcgcagacccaggcggtgcgactccgagaacagcgacgcgcgcttcatccactgcttggtctccacctcgtcgtcgttgttgtcgctgtccttgggctccgtagccgacaggtccaccaggcgcacgccgatggggtacgacgcgatgtccgtcattcccacctggcgcacacggaacgagttgctcaggttggccgcgcggaacgccgcgcccagagccatggcctcgtcaccgttgaggtgcacgcccaggtccttgccgtcgaagaactcggagagctgctgctggatcttgggcatgcgcacgccgccgccaatgatctcgatctcgtcgatgtccgcgacggtgaggccggccttctccagcgccacctccacgggcttgagcgtgcggtcgaacaggtccgccgacagctcctcgagcttggagcgggttatggacgtgaagaagtcgatgtcgttgtacaggctctgcatcacgacggggatctcctcgttggccgagagcacggtcttggtcttcttggcctgcgcgcggatcttggccatggggcgcggcaccttgcggatgtcctcgccgatcttgtcgctgaactccttggccaggtgctcggccaggcgcaggtcgaacttggcgccgccaagagactcgtcccaggcgttgctgagcgtctggaaggtcgagatggtcttgttcttcttgaagccgtcgggcacgacctggctcgagaactcggccacgctcacctgcagcgacgtggagcccatgttgtagaagaggatgcgcttgggcttgtcctccgggtcgtagctggcgtgcacggccagctgcagcgccgacgccgtgttctcgttgatgagcgacagcacgcgcactccggagatctcggcggcgtccagcatggcctggcgctgggcctgcgagaagaaggcgggcaccgtgagcacccagtccttgacgggcgcctcggcgaacgtgtcggtgatctggcgcgcgtgcgcgaagaccatggccacgagctcctcggcgtggaacacgcggtccttggcgtgctgcagcgacacggtgccgccacgcgtggcgttctgcagcagctggtaggggaagtgctcctcgtccagcagcgccgccacctgcgggtcgctcagcgtcgtgcccagcaggcggcggatctgcgcgtaggccgtctgcgggcggcgcacgcccacggtggccgcgtccgcgccgtagaggcgctcatcgccgtcgaaggccaccatggtctccgtcttgcgcttgctgtgcacgttggtcacgatctcgaagggcgtgcccggcttgaccagcgccaccttgaagaactcgccgccgaagtccacgccggccacgatggcctccaccacgcaggcggccagcaggccggcgcccaccagcgccagcagcagcgccctcacggtcttcatgctatgctgtgtctagtgtctgctgtctagggtgcgtctcctcccgaggctgcggaattgcggaatgcgcgagggatagatactctacgggcggacggcgaagagggcaacgagccacgtgtacgtgttcggctgcacgaggcatagtggacgcaagtgaaacgggttttgaccaatgggagcgcgggacgtggcgaaatggctacaggttggtgaaagatggctacatctggggcactgcaactgcaagttgccttttttgttggagcagtagtgcgtcgaggacggaggcttgtgcctgcagctctgcagtgtggagcgaacgaatgcgacgcagaccttgctgcaattgctgtacctggtctttcagttgcggacactcgctgcagagtggagactgtgactcgaacgccgcggtcagagagagacagaggctgcagcagcgctcctcttggttgtcttcttcttcttcgtcgtcgtcgtcgctgtcagtgagaggcagcagcaactcaataggaatctgctgctcgaggcgttgacgacgcggatgcattgcagcaggccgagccagacgccgcttcttctcgtcttgcagtgctcgcagcttggtcttgcacgcggccagttcgttgcggagcgtcgcctcggtgcggtgagccttccggaggagggcttcgagcgtgcacacttcgtttatatggtgctggacagcttcgttcgctgacgagagctcgtgcttgcagtgcttcagctgcgcttcgaccttcacagctgagctttcggcagcttgtcgcttcttggacgccttctccgctcggtctttggcctcgcgcagctccctcctgtcttggctcttcaacgcagtttccatcttggtcttgtcacgctcgaagcgctgcaacgcactcgtcattcggcttttccagtccagtttctcctgggtgtgcgttgtctttagctcgttcacgtccgcctcgagcttcgttgccttctcggtctgctgctgcagtgccgcagtcttgcgctgcagttgctgctggagttctctcatttgctgagccaatttgttgttctgagcttcgagggccaaggttcgtgtctggaggacgtgcgaccgcgccttgagttgcgtcaacgctagctgcgtctgcaccgactgggcctgtgtttcgtccacctgcgacgtctcctccagcagctcggcctgtaaacgcggtagcttagcggcgtagagctcgttctctgtcttgagcttggccatttcggcgttggagcgctggagatcggctgtggcgacggcgagctgggtcttgagacgagcattccgttgcgacaacttcttgttgtcggtctcggccatcgagagctggagcttgaatgcccgcgtagaatttttcagctctgcacgagctgcatcaagctgagactggagaacggcaagacgtgagccaagagttttgtcggagttgctagctttcccttgtcgtctctgaccttgacttggtggcttcgcacttggactcggagcagcagtcgatatcggcactactttcgcattctcagtcggcgacctccgcaacgacgctcttgtttcgtagacaacaggaaacaaggactcgactgtgtagattggggctgtcgaaagaccgatagatgcagccttggcaacttccggctgctgctcttcgatgtcgttcgttgatgatttagtggttgtgtcctcgctcttctgttccgcagtgattgtttgggttggctcttcagtggttggttttggaaccttgtcgagcttagttcgcttgtcgttagaagtggggacttcaatttcgttggaattatcggtcgacaaggctaacgttgaaccgggcttggagtccaagttttggatcgaaaaatcctcgtggtgcacatcttgaacatcactcgcgtcagcttcatgagcgagttgatcgttgtcgttaccgtgcgtcgtgtgtttcggttctgaaatccgcgggctctcacattgtggcattgggagtgaagattggtccggaggagcgatctcttcgctgtccgttccgtgctcagtggcatcaagtcgaacttcgtttccttcttgctcttcaccttcattttcaactaaggcgtgttgctcggtgaactcctggtcctcagtattggtctgcatttggatggatagtggtggagacgggcttaccatgcctagatcctgttcagtgatgtcaaagcctgctgcaccgcttaagtccgttccaccgccattgctctcgaatagtttatcatcaactccaaagctatcggctgcattcaaacgcggtccggcgtacaaggagtccatggacagcgctggcaagtcgactgagtttccaagttggccgccttcgccctcagtgtcgcttccgaacaggtcagcaccgctgtcggcactcaaatttccttcgtcgccgctcatttcttgcggtggaatgctacgcttcttgaaatgtgcaaggtgagcatatcaatagccaacatgagcgttatgctagtcgaacatcatctcatgaggtatacttagtatttgatgctgaaatgcaccaggctaaaagttaaggaaaaatgcggtccgtttgtcagtcttcttgtaagcttagaataaattcctagtcgcctccgttcgctaacggcgagcatccgtccactcttccatgcccttttcgttcatctctcgcaaaacccttttgcatctagtctcgaccgctctcccgatgagccagtgcctgagttctcgcggcacttcatcgtcagtgaagatcagttctaccaacttcttcaggttcgccgggcgacacaatgcgtgagagaacgcggccctgatcgcctttcgagaagtccgctgtttcgtagagcaagagcattaagtcactggtctcacacgtggacgcccactcgaaagcctcgcccctcagctcagcggatatgcgcgtgtcgtgacgcagcaaagccacgatttcagcttgaccgttggatgctgcctgcaccagcaccctgccaaccacctcaacttgtatacggctatcttcatataatagcttgaagatcttaacctcattattggtgaatcgaaaccgcgagtactccaccccccagccagaagcttgcttaaacccagcaacgaccgcttcgctggagacgccctcgttctcgtacagaaatttgaccacctcagtcctatttgcagcgacgaatgctcggtcaatagaagacggggttgcacgcttcgtactacagagaaatttcaccaagtcaacgttgttccgagtagccgcaacctccacagcctcgtcaaatgaatctggcaacacttgattggtaccaagtagaaacttcaccgtggcgatagagccacgcttagcagcactgataaacgcattattaaccacttcggggtcgctgtcttcgtagctgtacagatacttaatggcattggtccaaccaccacggcatgccagctccacaagaagcggcctccccttgtacttctcgcgataaacgttgtacactcgacctgcaagcgcgtcttgactagtttcgcttgccgcgacgaaagccgccaccaaatcgcaccaggaagcgcctaacccaagcaagaactccaccacatcagctcgccgtcctgagattgcctgggccaacgcacccgaccggcgcacaaacttcgcgtacttggcgtcgactgcgagctttaccacgcgcagatgcccattccccgatgcgtcattcagaatctctacaactgtggaaaatgcacccaaagcggagtactttgcggggttaaacgccttccagagaagcttcaacacggtgatatggttgtttgcgctagcagcaacgactgcttgttgcagcgatttccaggccgcccagcgacgaaccatttcaccctactacgcacacccctcacgatttcctgccgtatcttgctctggtcctgcgaaaactcgcccgcgaagaactttttcagcaagatacgcacacatttcgggtggttgttagcagcagcgggccctaatgcacttggcacttcgcagtcgtatctcttcagcaggtgcctcagccaagccacttctcccgtcgccgctgcctccacgatcgcctcttcgggtgtcatgagaaatgagtcgagctgggtcagaatatgcggcagcgcttgaatttcagcggggaagcagccacccctgacttgcttgtagaagcataagttcactgtgagttgtaaatgctccaactcgcttctactgtagactggtcgtagtttcgggctgatttaacttttgcattgtttttggattgatgtcagcatcaaacaagcggctttgttgactccacgtattgaggtattttgactatgaggagtcttgcctttacacagcgatgtcgaaggagcaacgaatgagttagttctatcttcggcacagggtcactttcgaacaggctgccacagtcactgtcactttatcttcgctcattgtttgcatgtgcgtatgcttttgttggccagacttgtggaaataaacaatggacagtcatggggaaattcgaaacaagccactccggagggagttcagcggacagcccaacacaaaataattaggcgcccgcactacctggataatcgtcgatgacatgaatgtttgatactgaaatacaaaccagaaaaaaatcgtcatgaaagttattcaaaccaaatcaaatttccagtcgccggggtgcattatccatactggcgagcgaacagtcttccaatccaatttcttccagtgctcgcagaaccttttcatgtctggtctcgaccgctctccctatgatccagtgcttgagcttccgtggcacatcgtcgtcgttgaaaatcagttctactaacgtcttcaggttcgtcgggcagcagaaggaagcgctagagaatgctgaccaaatcgcatcgggagctgtacgctgcttgtcgaacagcgataccatcaagtcgccgttctcgcatatggcggccatcgcgaacgcctcactcctcaattcggcggatatgcgcatatcgtgaagcagcagtgccacgacttcagcttggccactgcatgcagcctgcacaagcgccctgccgacgacgtctccgggcacacggctatcctggtacagtaacttgacgatcttaacgcttctggcgtcgaacctaaagaacgagcagtctctcccccagccggaagcgttcttgaagacagtaacgatcgcttcgtcggagacgcactcgttctcgtagagaaacttgagcagctcgacgctacttgtcgctacgaacgctctgtcaatagaagacggggtcgcttgcttcttactgcagagaaacttcatcgtgtggatgtttgacatcggagaatgggccgcaaccaccacagcatcgctaactgcgcccggcaatactcgattggtaccaagtagaaactccactgtgtcaataaaaccgtaccttgctgcgctgacaaaagcctcgccgaccaccacgggatcattttctccacggttgtacaaatacttgacagcgttggtccagccacgctgacacgccagctcaactagaaggggtatttccttgcgagtctcccgatacacgtgagaaactcgatctgcaagcgcgtgctggccagtttcctgtgccgagacgaaagcccccaccaaatcccaccaggaagcgtctaacccgagcaaaaactccaccacatctgtttgccgtcccgcgatcgcgcgtgctagtgcacccgacggacgcacaaacttcgcgtagtcggcgtcgactgcgtcctgaacgatgaactttaccacgcggagacgcccattctcggctgcgtcttccaagattactacagctgtggaaaacgcgcccaatggcgtgtgcttgaccgggttaaatgcctcccagagaagcttcagcgcgttgatatgctcggtggcactagcagcaacgactgcccgctgcaaacattcccacgtttcctcacgacgaaccgattcatcgagcagggagttgccactgcctgttccctgccgtattctccatgggttctgtgaaaactcgatcgcgaagaacgctctcaacagaatttgcacacactccaagtggccgtttgcagcagcgggcactaaggcgcttggtacttcgcattcgtatctcttcagcagttgctccagccatgccgcgtctcccgacttcgctccctccacgatcacctcctccggagccatgaggagtctgtcgagctgggtcagaacatgcggcagcgctagaatttcagcggggaaggaggtgccccgaagtcgcttgaagacgcaacttggcttgagctcgctgcgctgtggatacgcgcggaatcgcttcgtgccatcccgagactggtcgcttgatcgatcacgtttgaaaaaggtggacatggcggtggtggagcttctgacaaaatcggaaagtgaaaggatcggtctgctctgtcatgtggatcggtgtcagcatcaatctgtcgaccgactgaagtacttcgactatcgctcgcaatagataaagtgcaagtcttaccgcacaattcatctatccagctcaacgaaggatgccgtgccgcaagaagcaacgaacgtcatcggagaaacctcgcgacgtgtggttcaagatcgtcgatgcggatttctccactcaggcagagcgcgtgcagttgtccgacgctgcaaccattacagactttcgtgctgctgtgaaggagaactattcgaattttttcaaaggcatcgacgcagactgcctggtcgtctacgcagacatggacgcgtatgtcgctcgacaagagttgtccgatccttctgcgtcgatatctgcgatggggataacagaggatagccagctgatctacgctgcgggacttgcaagatcctcagactatgtgtatttgatccagcctgctctccaatcgaaggtcgaagctgcggtgtttcagattgaggatgcggatggcgactacgttggcatgggggtgtactacagccccactcgagcggtggcttgtgcgcacatcttcacttcgatacacggcgatatggtgacgatggtttgcggggaggagcgtgtcgccgtcaaggtgaaactgcgtaatgaaggcaatgatttcgccattctggagtcctcgagcccaaggcccttcatttcgatatggaagggaaatcttcgtgaactgcgaggtattgcgcttgtattggtatcgtacggacccggcattgataattaccaacgcatgttcgagaacgagctcgcattttctgctgcctcctgtgtggaagtgtcgaggttcaagacgcacgtcacgtactcgtgtccagctctcaaaggaaaatctggagcggcgcttgttctggcgaatggggaggacgtgcaactacatgtagttgggatacaccaaatgtcgatcaatgctgtcgctcgctcggctcttttgttgcaaaatctaacgggttgagcttagaaaacgatggcaaggcactctgcacaggaagtgatctgtaaattggctcataaaagaagtgcatttagtcgacagacacagagttttagttcgaagaggcttctatcagtagataccgttctctcgtggtgccaagatctcgctcaggggaacgacgcgtggtggcgaatggcgtcaaacattcgttgcagtgagttcacgcgtttgtaggcctcgtacgcttcgcggaacccgtcaccgtaaaccggcgaggtgtcgttctcgagttgctgcttgtaaaacttccgcagtcgaccctcgtacgtgcgctccttggagtctttacgctccatcatgtgcttgtatttcaggaagaggtaactcatcagctggcacatgccctcctcaatctggttcatgcacgcacaacatcagaatattgaacattttagatctcggtacgtacggtgccagccagcataccttcggtggaatgtggtcaggaaagttgttgctgagcttgataaacgcatgggtggcttcatgagccaggaccgaagccgtgaggtcgtacggcagcccatgcagaatcaggatcgcgttcactgagcgggtctgttgttcaaaggatcagtatgttagccatctgcaacatcgctacacttataaagacgcatgacttcaagtaccttctggatggaggccactcgaggagctgcgtgcttccctgtacgaaccatgtgtcggatttgggaaacctccgacaggcaaagaccgcgagttacatggcctttcacgggtttgttgccattcatcagcgtgtccgtcttcttgtgggcattgcattgctcattcaagacgggagactctaccaggtaaaccgggatctagaataatgcagggtatcagtatttaacgtgcggattgcagtgtaaacagcaaaagcgacgcacctcaggaaggttgataccgatgtcccgcatgtaactccacacctccttcacaacactttgagcctacaaccgtcatgccagcacgttcttgagcctacaatatcgagttgacgcgtgcttcaacgacacttacctcgttcgagtcaagcaccaggtacttgcagcaatcatggcaaatcttgcggttgtcactgagactgtggaactgtcgccctggaatagtcggctggggtgcaagaagcaagcgttagactgtaggctaaccacaattccgatcctgacggttttggtacgaacctcaacacgctggcagctgcagcaacgatcgcgattctcgtgctcggcgcagtatttcaggtcccagaagggcatcacctgtagaatggaaccacattcaatcgtcaattatcccacgcagtttgggggtaggggggtcgaagaaaaaatgaaccttgaaagagatcttctgcgtccccggttggtacgggataaaatcctcgcagacatcgcagctgcgatggcacagcaagtgtttagagcaacttcaaccggataacataagctggcctcacttaccgcgggtggtagagctgcttgtagcactcgtggtgatagtattcgccgtccttgacttgaaacttgctagtagagaacttgctgtggcacgcggcgcaacggaaacagtccgggtggtacgctttaccgctcacattgacccgtggtccgtatctgcattcaacccagagaacaagtgtaagtatcttagaccaattctgacaagcacccatttaaacccacttgatctcgccgttgcagcctgggcactgcataatgcggattgcattgcaagctccacaggtcggggctgcgtcgttcgcattgaagaaggtgcacgtggggcagttccaaccagcgccattggccgtagctttgccattggagtttccattgacgctgccgttcaccttgacgttggcattgctgctgcggttctcgttctgcacgggcttgctgctgccgttgcttccccctccagagactctggtcgtagtggtcgtcttggtggtggtcttgggcttgggcgcacactctgggtggtagttgccgccgttcacgacctggaagcgactgggcagcgggcgcttgcagcccgagcagcagaagcagtccgggtggtacgtcttgccgttcacgtgcaggcgcttgccgtacctgcagcagcagtagcatcagcgttatgagtgagacgatgatgatgatggggaacgcacgcgaatgatacatgggctctcacttgatctcgcccttgcaggtggggcactgcagcatgcggatggcgttgcaggcgccgcagttggcgaccgcgtcgttggcgttgaggaacgtgcactgcacgcaggtccagcccattattattgcgatcttcttctctccttctcttcgaggtcttgtgcttcagctggcgaattccgaactggttgcgcagcttttgagctaatccctacattgatcagatctgatacttaacgccagatgggtggcgagtgtacccggtatgtggtacactttgccagacagcacacacgcacttccagaaacggacaaggatatggtgaggcacacgagcggctctggggctacgaccgcggcgtgtcgcggggccccggggcgtgtttcctcaggaagaacaagtgggggctgactgacgcccgtttgcctgcttgttgccggccgattccgccgcgtagagctcctcggacccagccaagaacgccagcgccaactccgcgtccggtgcgccggccggcggccccacggacgcccaggacctcacggttttcgtaagttattggctgcattgtaccctataatgccactgcagtcgaatggtgttgttggggctaactgtggtggttctggtggcgtgacgctgcgtggtgcaggtgcaaagtctgttggagcaaatggtacgtcgcgtcacttccgcctgtgcattgagttgaattgagtttctactgtactggaagttctaatgttgtggggttctgtgctgtagcaatcgcggttcgcgcagatgtcggacgctatcattgggagaaatatccttttcaacttttactgatacctcgctgcatctgagactgttcgtgatgaggatgctggatgttggctttggtttccttgactgtcgtggcgtgcgatttgctgctgtggtggaagtttactcgacgaaatgggctcgcgcatcgacgagctggagaagtccattgcagacctgatggagcaggtgagcgagtctggaggaaagtgctgtcagggtgacgatagagctaactcgcttttccctgctttttcagacaaacgaagacggcaacgacaagaaccaggagccggcagcatccgcacccaaggacaagggcgagagcgtctaagcggagcgacttcgccattacatgtacacgcccatggcggtcgagcgatatcaacaaatacgcatttgaaattgctttgcatcttgatttcccgttgcaaacagtaaattacttgtcggcgtcttcctacatgtgtccatctaatagagaaaccaacacgaaagcagcaaaatactaaggccaaagaggacacgtgccgtcgtctaaaggtcgctcgccatccgccgtccggctagctgcgctcgctccggggacagaccgcttgctcgctgcgtttgaacacatgcgcttagtccttcttgtccttgaactcggcgtcgtgcacgttctcgtccttgctgtcgtcgctggcagcgccctcgccctgctgcgccttgtagacggcctcaccgatcttcatggacatcttctgcacctcctcaagggcggccttgatctcctccgtgttgtcgccctccgacttggtccggaggtcagcaagagcggccttgaccttctcgagggtctcggcgtcgatcttgtcctcgtgctccttcagggtcttctccgtcgtgtacagggtggagtcggcctcgttcttggcctcgatcagctccttgcgctgctggtcagcggcggcgttggcctcagcgtcagcaaccatcttctcgatctcagcctccgacagaccgccgctcgactggatcacgatgttctgctccttgcccgtggccttgtcacgagcgcccacgttcacgattccgttggcgtcaatgtcgaagctcacctcgatctgcggcacaccacgcggggcgggcgggatgcccactaggtcgaagttgcccagaagcttgttgtcggcagccatctcacgctcaccctgcagcaccttgatgcccacctgcgtctgcgagtcggcagccgtcgagaacacctgcgacttcttggtcgggatcgtcgtgttacgcgggatcagcttggtgaacacaccgcccagggtctcaatacccagggacaggggggtcacgtccagcagcagaatgtccttgacgtcaccgcgcagcacgccgccctggatggcagcgcccatggccaccacctcgtcggggttcacacccttcgaaggcttcttgccgaagaactcctcgacggtcgactgcaccttgggcatacgcgacataccgccgaccagaatgacctcgttgatgtcgctcttctccagaccagcgtccttgacgcacttcttgcacgggcccatggtgcgctcgatgaggttgcccacgagcttctcgaaggtggcacgcgagatcttcatgttcaagtgcttggggccggtggcgtcggccgtgataaagggcaggctgatgtccgtctgggccaggccgtcgagctcacgcttggccttctcggcggcctcacgcagacgctgcatggcgaggttgtcgcccgacaggtcgatgctcgtctccttcctgaactcgtccacgaggtagcgcagcagctcctcgtcgaagtcctcaccgccgagcagggtgtcgccgttggtggacttgacctcgaacacgccgcccgagatctcgaggatcgacacatcgaaggtgccgccacccaggtcgaagacggcaatgaccttgccgtcggccttgtccatgccgtaggccagagcagcggccgtgggctcgttgatgatacgcagcacgtccagaccggcgatcttgccggcgtccttggtggcctgacgctgcgagtcgttgaagtaggcaggcaccgtgaccacagcctgggtcacgtgcttgcccaggaagccgtcggcggtctccttcatcttggtgagcaccatggatccgatctgcgagggcgagtacttctggcccttggcctccacccaggcgtccttgccgttgttgcccttgacgatcttgtacgagaccaccttggacacctcctgcgtctccttgtcgtcgaacttgcggccgatgaggcgcttgacggcgtagaacgtgttctccgggttggtcacggcctggcgcttggcgggcatgcccacgaggcgctcgtcgttgtccaggatggctacgaccgacggggtcgtgcgcgcgccctccgagttctcgatcacgcgcggggtcttgccctccatgacggccacgcacgagttggtcgtgcccaggtcaatgccgatgacctcggagccggcggcggccgagaacatgcgcttggaggcggcggccgcggcgggggcgggggagcgggcggcgagacgcagcatcgttctgtgtgcgggctggaggaggatctgcgggggaaggcgcaaattcacgattgaaggcccggagccactcgctgggccacacgtacttgaggttgggatccaaatttcgctttgacaaagaggcacttcattctgataaagttttgaaggcaaacgcggtctctatttagtcaaatcagcttaaagatggtactgttatatcggatttaaaagggtatcgattgttggtggaaaccagatggtttttggccaaattacgcgcttttgatgggtaaaatgtgtgtcggactttttcttgtggacggtctgtccgatctcattggagagtctccaatggagacacctcgacgtcgagcttcgagaatcagcacgcttgggagagcaatctgaactgcgcaacagtggctgtccttcttgtgctgccttgccgacgtgctcaagcattgtccgccgcgacggattttggttggtttcacattttcaaacaattgtgacgcaaaaatggtcggactttgttttccgaatccttccagaacatcaacgaaggaacatccgcacttaagcgggatttgtttgacctcgccgcggtttgcgcgccaagcacgtgcggaggcaggaccagggcaggcagcaaaacaggagcaaagcccaaggcaaacgagacgatggtgtcgctgtttggcaagaagaaggagggcaggacgctgcgtccgcgcgtgcggcgcgccaccccgctcatggacgtggggctcgcggtcatcctgggcgccgtcacgggcgtgtacatcttcaaggacacgctgcagcgctggcagatctccgagggcgagtacgtggccgccgaggtcagcaaggccacccaggcgcagcagaacgcccaagccgcggcagcgcaagattcagctaggagttaggagctgcggctgcgacctcgtgggatgcaggcgggcgcgagcgtggcaaaagccttgctgttgggtggagatcagagctcgaagtggctggccacctcgggaccatcgactgaaagcaagcgtactacgctgcgatgctgcaagtattgcacgagaggagcataaatatataggaggttgaaaacgcagtgagctggtgatcatctcggcagcattagcctgcccgcgtgtgcccgtgccggtgctgcgggctcacgtcgacgcaaggaggatgtgccatttgcagccgcacatctgctgtgtggcgcacaccaattctacaaacgttttgatgtggtgctacgtaatgttagcagtgcgatcatttttttcagccaatcaagccgtagtatgcatattagctgcgcggtgctcaacgccaggaagacgcggtcgagatgagcgacgtggcgcagatcttggggctcgctggccccaagtcgggcgcgaatggggcggcggcgagtgaactggaccagctgaagcccacgggggcgtcgccggccgtgcgcggcaagcagagcggcggtgccagcaagcagaagaagctcacgggcatgcagcgcgaggtgctggagctgctggagagcaaccaccgcgccagccacgcgctgtaccagggcttcggcaagacgactctcaagcagaagtggcaggagcgcaagaagtccccggccgtcaagtggctgcgcaagtccttccggaacccggcgcgggcggggctgccgggtgagagcggagaggagggactggtgctcacccattgggggaaggcccacgtggagcagcccgactacgtgttcgccaggtttaacgtcaagtgcgatacgaccagctacacggacgaggagtacgaggcggcgctggcgaaccacctggacccgatgatgaagtggaccaaggaggagacggatctgctgctgaagctctgccagcgcttcgacctgcggtaggctatgctctgagtgtggtgggagctgggagcaaggctaatggttgtttgtgattttgctgctactgtggctaggtgggtcgtggttacagacaagtacaactcaaatccgatcgcgaaaagcgctccgcggtctatggaagatattaagtatcgctactacgaagcgactcgacttctatctgaataccgggacaagaagacgagaggtgaacttgaaaagaaggcagcagtggccacccctgccgcaacgagtgctggtgctccagctacagaaggcacaccggccggagccgctactgcagcaactcctgccgctgctacggtcgagaccgggggcgcgaccagtacgccgtcaacgccggtgctggatacacctgcctcctctacatcagagcactacaggtttaatatcgcgtatgagaagcagcgtaagaggcagctggatctcacgttttctcggactgccgaggaggagaacgagattcgccgtctaaatgacgagctgcgcggtgtggagcaacagctcaagaaggtggctgttagagcggacccgaagaggaagaaggaactcgccgatgttccttacgagatcaagcgcacgctgcctacaggcgtaattttgcgaagctcgttgctcgcgcttccgcagcagaagcatgcgctcagcgcaaagttgttgaagaagctgcagctttttctcgacgaaatgggtgttccagctcgacctatgcctaccaagcctgtgtgtgaaaccttcgacaagctgcgccaagacgccgtgggcctgttgtcactgcgcaagcacctaaagagcaaacaaaacgaggttcaagcacttcgtgaacgataccacgcgctgactggtaaggagtacaagccgattactacgcctgtcactctatccggtaaggtgccccttgactttgttcgttatcatggagctacatcactcatttactgttcgatgtatgcagagcgaccgggagatgctgcactgcctgatggaagcagctcggcagcttcagcggcgggccacgcacaaagcacaattagtaaaggtgcgttggatgcaatttcttcatccgcagttgaatgtgaactgagtggggtttcttgtgtcgtgatggtgcaggcaagacgtcaaagcactcggaaaaggcaatccgtgcagccaagcgacgcagcaccagtggccacccaggtctctctgccaagcgcaacaagaaagtcccgcattaacttgttacgcactaatgtcatccattaccaccttattattgtgccgatgttggttgtcctgcaaggcttgactttctaccggtagcctgacgagccggaagcaccatacaacctgagctgcgctgttgaatcacgttaagacgttgttgaatgtacagtacgagttctatctaccgttaatctacacggtgcctagctaatatctgctggctgctgtcatggacaatttcacgtggatgcccatgggggaggagacctcttttgacttttttttttcatgtttttctttttttcatggggttcttcttcttttatctcctcttttcacacgccccagcaccagctccgtcttatcgttctcatggcagcagcaacgcgggggcagaatccccaccccacttcgcctctctatcacttcactgctccgctggtcgcacacgaacttgcacttgagcttgcgcttgtagggcagcttagcaagcaatttccagcgctctctcgaccaccttcactcgctcacccaactctaccagtctagtagtacgggtggaagccgcgtccgccccggcctccgcggaagcctccacgaggcgggccacggccgcgtcctcgtccccgtcctcgaccacgtccaccacgccctccacgggtcatgttgaacccgcgcacgttctgccgcttgggcgtgaccttgagctgccggccgcggaacatggtgtcgttgagcaggagcgcgctctccacggcgtcgcgcgaggcgaactcgatgtacgcgtagcccttgggctggcccgtgaacttgtcgcacaggatcgtgacgcggttgatggtgccgcacgactggaagagcgcctgcagctcctcgggcgtgctgccgtagtccacctggccgatgtagatggacgtgtcgtccatctgcacgggctgcgcgctggccgccgctccggccgcgcccatctcgttgagcgtggacgccgtgttcttgcccatctgcgactcgacctcggactgcatctcgctgagcttggcggcctcctcctccatctccttcacgcggcgcttcatgtcctcgatctcggcgtccaccgcctcggcggactcctccgtggcggcggcggcgggggcagccgcctcgcccgccagactcgccgcctcggcctcgagcttgctcacgtccaccgcttcgtccgccatcgccgcttgtcttgcgttttgtaggtgcgcgcgatggtaacagccaccaggagaaaacctacgtaagcgcatgttatatgatttacagtaggtttctggtggggaacctgccacatcacttttagctacgatggcgggggcgctcgggtcgcagcagatggaggagctgctggctgcttgggacgacgccacggcgccgctggacgcgcgcgtgcgggaggacccgctcttattcgcgccggagttggcggccaccgcttcggctcgagtcaagcggctgaagggagcgcccggggctgaagagaggggggaactgtgtcgcccctgggaccacgcggacttcctggcccgcgtcggcagcttctccatcgcctcgtggttcgccaagccggacgcgatcagcgcctttgagtgcgctcgccatggatggaggaactcggcgcccgatcagctgcagtgcaactggtaaaagactgtagagagacgaggaggaggacgctggactgtagtagtgctgactgctcttgtgtacctatgctgcagttgcaagcggtttctgtgcttcaagatcgacgacaagttgagcgaggcgggggcgttgaaggtggcggagaagttcgctgcgcagctggtcacaggccacacggagctctgtccgtggcgtggtaacccgtcgccggttgctttcacgacggtgaggactgtttgcgagttgaactttgagtaggaatgagtgcaatctcattgcgggtgtttatatggatgcagctccccattgcaacgaagcgccaggtgtacgagacgttcgtggagcaactaggggaagaggtcgcgtggatgcacaaggacccggagtttcaggaccgattgcggcgtgtgaaagtcgctgatgcagggactgcaaagctgttacaggaagtgaatggagctgaagatgctgctactcctatcgatattgtcacgttccaagcgaaactggcagcgaggtggtcccaatccgagaacgaatccgtgcgctctgaggcactagccaacgccgcgttcctgatcgcgtgcgggtggagatttgatagaaaggatggcaaagacctgcatatgctgaggtgtgaagcctgcaaccgtcggtggcaggtttctccgacgagtgccaaggtggacgatggtgatagtgaacacagcgaaccgccaacaaaacgcctgaagactgcagaggcgcgtccagtcgacctgctttcacagcatcgccatttttgcccgtgggttgcagaacgcaagtctaccggtgtcgacgactatggtgagattgacccaaagctgtgggagttcgtcaagctaccgggatggaaacagtacgcccaggtaagcttttgctttggatcttgtacaggagtggtgggctgtttgttgccgcatctgattgctcgtttggactatgtaggcactggttcttctcggcaatccagaagagaacgctattgttgttgtggactccagcgaccaaacgcacacgaaatccagtgaccctgtgcaggcattggagtcaatacgggcagtattggggctttgaggttggtaaaacagattccaatagcaggactggttactgcagaagaatattagtcactatcaatcgatcgcactggggatcaatagtccaagggccatattacgactgtatcgtcaggcctgaagcatgttcacctcaagcaaacgcgaaagatcaaagcaggcacgagacaacactaagcaacttcgagaactcgagatatgttgcggctacgagcgggctacgaacgactcaggggcacctacttccccactaacgtcctagcgctgccgcatgtgttgacccaaatcgacgctcttctcatggcacctgaagaggcgatcatggaggcagccaagtcgggtgaagcagtgtggctgaggcaacttttgctgcgattcgagtgctgtgtgccaaatgcactggtgcctgctgctgcgaacggccacctggagtgcgttgacgccttgctgaacaagtttttcggcgaagaaacattccaaggcatcgtcctaaaccagatactgttatgccatgatggaacgctgtcgactcaaagagagatgttagctgacggaagtggagttcgagaagagtcacgggaaataggagactagattgatgatgcttgactataagcccgagtccacggacaattcagtgctcagtttgcaacttaccaacaacaactcgagactcattgcaaattgaaatgtcaattctgtactatggaaaatcaagaaggaagacggcgcacgacggtgaagttcaagtcacgcggatactaccaaggaaccaaagaggtcgcgccgtttgcaggaggtgactggaagacctggctgcagttccagcaggagctcaaccgcaccttcatcttcctcttcatcttcctcgacatggacgacacggacgcagctgctcgcgggatgcagcagattatcactcagcttctggagggaagagacctggacaccttcacggacagcgtgcaagaatttcgcaacgatgaggccactcactggagggtgattgagcaggcgatggatagactaaccgcccgctactgcccgatgggaacccgagagcaactacatgacgaggtcaaggagttgcgcaagacacggaacatgacggtcaccgaatacgccaagaagtttgaagaattgctggccctggagagatggattctggattacgatggagaacggatggatgaagcggagcgatgccgctacttcagcccgggcatgcctcgtgcgtggcagatgcaagtagagagccccaacaggcccgctggtcagaccggccgcagacgaaggaaagatatctgcagtgcgaacaagtgtaacaacgaacggagaaaggaggcgtgcgccatggacgaagtcacgacgaaaagaagacggacaagaactggaagaagaaggccatcagccacgagaagaagaaaacggagctggggaagcgagaacgtgacgacaagacggggtgtgggttttgcaagtcgcgcggcaaggcgtggaagaatcacggcaacccggagtcgccgcgctacaaaccacactggaacggacaatcgaagaagaactatagtttgcaagggaagaagacaccgtggaacaaccaggcggcggcggctgaacacgtcgagagtactcagcaaggagatgcagaccccctttcgtattggcacgcccccgctgcgacgaaccaagcagcagcagctcaagttgccgccggtgcacacgggactgtgttgaagacgaagctaatgttcaagcatccgttaacgaagcagacttttgaagcactgctggacactggaacgacacgatccctggtggccaagaagatggtctcttggtacatgccgcatggacagcaagagtggcatcgcaatgtgaacaacaaactgcagcctgccatgggcgtcattgcgctgccgttcgtcctcccggaatttacggacaagtgagtttgcactcaggagttcatgattgtggacaagctacttcatccggtgattcttggaacaaatttcatgcgggaacaaggaatcgtgatcgactatcgtaagcaaactgatttctgggatgacatggagttgccgatggaggacaaaccggcaccccggcgacgtgttgcgcttgctgtgcaagacacggatgagcgggtgctacgaattcttgacgtcaaaggcaaggagattgatttgcgcagactcatccccaaggaacacctcagcgaagaccagaagcaacgcctgtgggaagtgctggagtcttaccgtgtagtcttcgtgggaggtcctggaaaaatgcggttgaaaccctacgaactaccgatccagcctggaagtgtaccctaccaaattcctctcatctaccaggacgccatgcgacaagaagtggagagactcgtgcagctgggcgtgttggaacctgataaggactcgccgtgggcagcccccgcgttcgtgatacccaagaaggatggatcagtgcgcttcctcaccgacttccgtgaactcaacaagtgcctgcagcgacactacaccattttcgggtcgttctgcacaaatgctcgattcaaaacgatcacgtagaaaaagggtgcgtatacttatggcgtatacttggccgacttctgatcaaattctcgattcaaaatgaccacagccatttcaaaacgatcagctgccctttctgtgataccacagagggaagcagatcaacaattgtccttttcgagaaaattctggctgatctcagtattaatttgagaacataaatacgacgcagtgtcaattgttgatcagtctttcccacaacgtaccagaaaaatggcacatgttcatttagaaaatgaaagtgattgttttgaatccgtgtactgttctggtcggagtcggacgtgtatactgtccttttttctacgtgattgttttgaatcgagcatttgtgcagaacgacccggaaatggtgtactatccgctcccgcgaattcaggacatgatgcgcgagctgccaaagcccgtgttcgtgaccgcactggatctggtaatggggtactacagccgcgagacaaccgaagatagtcgcccgttgtcacggttctcccccagtcgacggtctaacactgctcctggagtgtttgaacacaatgcgtgcgctggacagacagaatgcaactactcgtgagtcacctcatgcgttccgggtgtaacgcacaccaaagaggccaggatacggtaggtcggtgccactgtggaccccgcgcagttgcgttccactggatactatgggagccgagccgtcggccgtgcgagtcagtcgtgatttttcttcgtaagcaacaacagcaacaagctactttactcttctcttagtcttttcttgagttcatctattctcccaacctcggcctagcaaggacacgaccccgacgaaggagaatcgtgacagtttggtggagaagcagggtacttcgccaaggttggaaggaattgagacgtgggaaagaagagagggccgtcggagcgaacgaccaagcggaacttggccacggaacgccaaggaagtgaaagaggtgtggggcacactatgagctccccttgatccggcgatggacagggcggggagtcaggggaagagcaaagcggatgggctgctccctcgactgcggagccgcaagtaccagccgagacccacgaagaagagagagaggcgacggaacgcgctgcaagtgcgggggccgaaggaagcacttccacaggggagagtctaccagagaatgcggtccaaggagcgacacgcaggcttgacctcgcaggaagaggagatgagatgccgcctggactcgagggagagagagaccaagaggggactatgccactacttgactcggaagaaactgcgtcgatcttggagacgccccgggggcggaagatgtttcagattttcttggctcaacttgcgcagcgacctgcactgagcgaggtgccagtacgggaaagcacgggtgagactaccggagcggctagacaagcccccccaacggcgacgtcgacatcgagaccaagcgaggtaaccacagcggttacgactgagccttcaagcgcgccggcgagaggcgttccttcgggagattcgactggagtgtggatgacttcgtcgacactggaacgcccacgtataccgacgtcgacgacggagcagaagggaatgttcgcctcgagggcagggcctggggtctcacctcccgctgtggttgccgcaacgactgctccaacaaggatgccgggaacgcacccgaggatggtgactacgccacccttagctccaaacgtgcctgaagtgggggtgagctcgccctcaggtgaccaggaactacaagcgttcctgaacgaagccatgctccaagcgctgcaggtgtacgctgcgcaacgaaacaaaacaactatggctgcagctcctcctctggtgatggaatcagtgccatcagtgcctctaccctcgacgtacgctccgcaacgaccttcattacccacctccatgagtatgggtccgacgtcccctgagtccctgaccactcctgcggatatgcctatggcggcgatacattcgtacggaggggtatcaattcagacgccgagtacgaatggaggcggggcgggtggtgggacgctcccacctggtgtgttctatcctccgttccaaccgccggtcgtgaccacggccgggtggggtgcgcccgcgggagcgtttccggcttgggcgtcgacgaatacaacctcggtgcctatggctcctggactgacatttcaaggcacggtcccggcgggtggagtggcgttccaaggacagtcgtggaaccaagtcccccaaagtgatgtgagccctcctcaaggcggtggctacggaatacaagcgactgctggtaaccctcaaaggagcttccccgttgtaggtatccctaccgagctgagaaacgcagtgaaagtcattgttccgttccactcggatagcgccacgtgtgagcgagcggcagcgttttggagatctttcgagaagtgtacggtgggaataaatgcccagatgaggctgactgcgttcgaacagtgcctgaagggtaaggttgggcaggagtggtggtataactcgaagaccgacggctttgaagctcttagagtgtggtttcacaaccgattcatctgccagactcctgctcaattgtggaatcggctcaagacagccaagcaaaacaagggcaaatctgccgaagagtggggagatcgcattccgactatgtatgaggctttgaactacaacgagccacggatgcagtttgagttctttttggatggtcttcggaacaagcagatgaaggcgatgctcaattctagtatggttacgtcgattccggaggcttgtgccttgttactgtacaagaatctgcacctgcctgtcgaggaggaagacgagttcccggagactaaaaccggactatcaggaacaatggccgacacgtcgactcagtcgttgatgttgcaacagcttcgccagatgaaccagctgatgctgcaacaacaacaggcctcaagtacgtctcctcaaggacacattaatgtggtagctccggcgcgagcccaaacgacgggaacaactgcgcctcagaggtccggaaccggatcccctccacttggaacgcttcgtattcgtctaggaccggacacgcgtacgacggaagggacaattgtatgcggccgctgcgagcgtagaggttgcagtcgcgaaacttgccctcgcgctacgggacacttcagtcggtgcaatgagttggggcactactctatggagtgcaacataccaaagccacaagccaacaatcgatacgcggaacgccgcccaccggagtgcctcctctgcggggagaggggccacatgatcgccaagtgtcctgagattgagacgctgaggggcttggtgaagaccggtgtcgtggctggaacgccggcaaccgctacgcagtcccaacaatgaagggggcaagagggaggggaaggaagtttcgctccttcctcttgcctggatgacgacacacaggggcgtgaatgctctccgacgaatgatatcatcggtgagagcgaggtggaccccggactgggagaagaaaagagagaaggtgctcgaagctttccagctcggcaccagacgacggaaattgtgggaaatactacggacagcgtggagatagattctccagctgaacagaaggaacagaggatggtcaaaaaagaagaaaaaggagactccggcgctacgatggaggcctcggagggagcagtggggctgtcggaggaaagagaacggtgatgataagtggaagtgacctcgatgaggacgccagcgcggagtcgtgtaactcgttaaaggtcgaaggaacgctgcagtctggcgacgaggacgtggtttcggcacggttgggatcggtcttcgtcgtgtctaaagcgctaagcacagaagggtcaacgcttggggatcgtgaagtgacggacgagaagctaagtactaatgaagtggacttggagagttattcgggacgtttgttcaccgacgacgagttggacagactcgaaaagggtgataatggggtgataatggaagaactggaagagtacgaaaaggagctagaagaacgcttgtttcctctggacgaggataggattcagcaaaggatcgaacaagcagccgaggaacggacgagtcccgctctcgcggaaatgagtaaagagctaggggttccgttggaagtattggaacagacgaaagatgtgttgtctccggagcttgctacaccggaatactgacttggatggtacgcaagaacattggagacatcggaggaggcgaagcgtaccaaccggaactttcgcgatcaaaacgtgacgtggtgcggaactcacgaagacaacgacccagttggcgccagccccagcggcccgcatagcatgatggaggttatggagcccgcgagggcggacgtccgagctgagggggtctccccggcgatagagctccagttcatttgcaatgtgtgcattggcctggatggagccgcttggctaaccgcgagtgagacagacgaacaggcactcgagctcagctggcgttccaaggtccgtaacggggtctacaagcttctaaaacgggaggtggtaactcattccggtctcctcgcagagcgactcgaaaaccccgaaggttcccaacctcaaggggaagtgccgccaaagccagaaacgttgaacgcgaacccgctagatgaagactctatacgggtctacctagcggaaagaggggcgcctagtgaggcgttcctctcgaaagcgattggctgggcaaaagcataccacgcccaagaggttccggctaacagaaacaagctatatcgccgaatgagagcgcatcaggaggagaaacacgtggtcgttgctccgcgtccgtcgacggagagggatacggtagcgttcgtccgcgctacgaagccacttggaggaggtaataccgacgacgcctcgaagctgtccgaagaagaaccggacatctatgtggtgaacgttaagaagatgtcaaaacctaaacgccgactgggactccgggaagccgggtcgaccgatgtccctgaagataaggaacgcctagtacctgaaggaaagcgtgtgatttgcagtgtgggtgggatacaggcattgtcccagggcctaattgactgctgtcccgcggagatgctggccgacacaggcgctattgcaagcctggtcgataaacgcattctcagacgaataggacgagcttctgaatcgctgagaccctatcacggcagtctggatagcgtgtcggggcacgagattcgtatcaagggggtaattgacctgccggtaaccctaggaaccttggaaaagacgcttccgttcgcggtagccgatcgattgccaatggaagtgataatgggaacggactctctcagggcgttccgagcggttatagacctggatgaacagacaatgacactgaaggagactggtgatgtgataccactgggagtgactcgcgtagaagaaacttatgcagcggcagtggcttccacagtgcgattggaacctggtcaccaagcgttgttgcggacaagcgtgtgcggagccgtgcacaatgacacggttgtcttggtggaaggcgttccaggatcagatgcgtctctacgcgtggaccgaactctatgttcggtgaaaaaggatcaagtgttagtggaggtctgcaaagcttcccctgacgctatagaagtcgagaagggagcacttattgcaaatgtgactatagttccggcatccgccttcacaaacgacggtgcggcgaagcgggatcgtaacatcagtgtcgtcctcagttcaacgagagggagagaccgccgcgtggacggagcagaggctgctgaaatggctgaagccttcaatagtggcgaagtggaagagttggaggtggactttcatggcacgtctctcggatcggaacaacgtcggatttttcctgatatgctacggggcttccgtgacttgttcgtggagacgtcgaaaggcccggacgaactgatctactgaaattcagcatagacaccggaacgcatgcaccgatcaagcagcctccataccgagtgtcgaaagccgaaggggatgtcatggaatctgaaatccacgagtacttggatctcggcctgattcgtccttcatctagttcgtgggcgagtcctgtgctcatgatcagaaaacccgatggaggaatccggttttgtatcgattacaggaagcttaacgctgccaccgtgaaggattgctatcctatgcccctaatagacgatatcctggatgtcctggggaacgccaagctcttctcaacgatggatatagcttcggggtactggaatgttccgatggaccccgatagcagtgaaaagacggcgttcacgagtaagtttggtttctatgagtggctggtgatgcctttcggcctatacaacgccgtacccgcgttcaagcgacttatggaaaatgttctggtggatctgaagtcgaggtcgtgcctggtgtatctggacgactgtgttgtgttcagcgaagattttccaactcacttgttgagagtcagacaggtgttggaacgcttccgaagtgctgggttcaaactaaaaatgaaaaagtgtcactgggggcgcaaccaagtagctgtcttgggtcacattgtgaccccttcgggaattctgcctagagaaagcgaaggcggtgatgaatatcgcgaagccgcacgatttacacacgttgagggctttcttggggctcacgagttactttaggcgatacacacccggcttcgcgacaattgcagcccccctggaacgcctgaagctgaagggagtcgtgttccgatgggatgaagattgtgacagtgcgttccggcaactacagcgagctctagtgaaacctcctatcttggtgtatccggacttcaagaaacggttcaagctctatgtagactcgtctcatttggcggtcggggcgtccttgatgcaggaggtcaatgggcgagacagagcgatcgcgtatgctagtaaaatgctgacaggttctcaacgcaactgggtgaacaaaaccagtgggacgacgaagattgaatgctgcggaattgtgtgggcgactcgtaagtttagatgttacctcgaccacgcggagtttgacctattcacggatcatcaagcccctacttggatctttggggagaatactcggacgtctaatgctaagttggcgaggtgggcgatggagctctcgcaacttcggttcaaggtgtaccataaacctggcactacaatgggaaacttccaaaaatcgcctattctaatgtaccaaattgctcccatctgctgaaccatgtgtgtactaaacttggactaacggatgctcagacgcaaaagacgtctgatcaaatgccgtccttggtactgaccaaagcctccaattagccttgacttcacagcctgatcgaatacaaagatgctgctctgtacgataaagccgcccccactccgcaatttccttgccaagaccgccgtacgacaccagccatgacgaaggcagcaaaaacgaagacaaagggcaagaacttcaccaagtccgaagtctcacgtgcgtgtacgctagcattacggagagatctgagtagacgactcacaaatatgacgtgttggtcacaggaatgctggatgttgtggaagctatccttccctttggagctgagcagtggcaaaacgctgcgtctcagttcaatacaaatattccagcagggtggactgagcgagatggcgacagcctcaaacgtaaattccaaaagctggttcgtgttcctaaaccgacaggtacggcgtatttgatgtgctggcacttgtgtggttttcaactgacctatttcgatttatttgtaagggaacggaacatgtcccgaggaggtgcagcgcgccaagcgtctacaatatgccattgaggcttcattgtctgttgttcagctccacgacaacttttcggacgaagagttcgaggagggagatcccgaccacgacaccgacgaggaagctgcaagctccgtgcttgtgactgctagttcacctctagcagcctcgacggactcacaattaacccaaacacccacggcaacttacaacagaacacctcgagcaacatgtcgtaggtatggggaaggagagagacggtattgatgaacgacttctcgcaccgcgacttgtacatgaacgtccatgcgcaaacggcgttagaggttagagcagcagtctttatgtagttgcgctcccgtatgagcatgcgcatccttatgaagcacatcagcttcttcagtagtgcgtgttgcctccttctctgttgctgacgttggacggaaagcgatgcgttgacacgagcaaggaggtgaccagtgtgcatggtgagggacggacacgatacggggacgcgagagccgacgcgaaggctgagacttctgaaatgaactcgggtttttggtggcagtcggatgaccaaatgagaactataccggcgccaagtggtgaactatatcgctcttaaatcttggtttggtacaacatataggcgatttttggaagcctcccaatgggccatgcagacggattgtctagactatatcataagtcagcacctgttgcgatcactttggttcggaagtctacgatcggtggcgtagtgggcgataacataagtgaatccactagtacactagagggagttacagctacgacaatggagggagaagggggcgttccagctgaagtcggggagcagcacaaggaaaccggtagggaagtactcttacccggcctgaatgagaacctcgcgggtgacgccccagccgaaccgctctctcaagatgagcaagaagaagacctacaaggaagagcactctcttctaacccttcgccggtggatgagtttgggctggactgcgataagtttatattggagcaagatcggaccccgtggatgcgcgccctgaaggcgttcctacaagatagcgccttagcgctcgactcccaactacgggtcagtgtactcaagatggcccctcatttcgtagtgcggaacggcgtgctgatgcgtagagtgcacttgggcgcacgcgctggtccggcccgtactatcaccgttcctgccgttccgttgccttttatcgaaacagtccttcactattgccactctgacgtcttctctgctcatctgggaaagactaagactgccgacaaagtaaggcggcacgcttattgacatggctggaaacaagatgtgatcgagtacgtgcgtgaatgttctatctgtggcggcggcaagggtcattggccctggagggctgggctgacgcagagaatgccggtacagaacttgactggaccattttcgttgttggtggtcgacgccatcgggcctttagtaaccacaccccggggaaacaagtatatcttggtgttcgttgcctatttcacgcgatgggccgaagcgttcgtggtggagttgcttgacaccatctcttttgtgaacgcaatgatcgagggtgtcatttgcaggcacggcgtgcctgaacagctcctaagtgaccgtggaacgaactttatctcgaatttggctaaatcgctctacgaaacactgggaatcaagaaattgttcaccatccccagacgcaaggcctggtggagcgtttcaatggaacgcttatcggtatgttgcggatgttcgtgaatgagactcagacggactgggatatctacctgccgagagtgttgttcgcgtacagaactgcctatcacgaggcattgccgttctttagcttatacgggcgagatccggttctccccattgacgtagcgttcttgaacacgagtaaacattggaaaagcaatgaggtggctgtctacagaaggaagttgtacaagtcgctcagggattctaggcggttggtggaacgccagctgatcaaggcgcaggataggcacgagaagcgtatggccaaacaagagaaggtcgagtacgaggagggcggtcctgtgtgggtataccagtatttcagagcgaaacgaggagagaaacggacaaaaaactggcattttcctggcacggcccgtatcgggttatacgcccagtcgggaagaacgcctaccgaattgctatacccactcatccgaacaaggtagtcaccgttaatgtgaaccgcctgaaacgattccggggcaaatggagcagaccttatgcggatgaaataccagagggtgttggtgttggcgctacggacgacggagtaggtcctttggaggaagaagatttaccgtcgacaagtttcgcggaacgcatctcgattggaggggaagagactgcaattacaggtgtaagctcaccgattgtggacattgtggctaaaaaggttgaatcgaggcaggtacaatacatggctctgacggccacgtacgaggcaatttggctcccccgggctgcactggtacctgaatacgatgctttaatcagagcgttcgaggaggcggatcgacgtaaaaagggtctgccggagctacgacgtagcgctagggtggtggaagccaacgcagacgtggacgacgacgagatcttgttctagtctatggtctgtcggatgcgaaccaggtggaacccgagggctgcatgagaatggtcattggacactgaggcaccgagggggttgtttgtatttttcctttattgattagtgcgtatggcgattaaggcgttccactactggatatatctggactacaatgagcatgggagaaacggagcgcctcaaacgattgttgatgtgaaatggagtaacgctgaaccgagtgggcctaattgtcggagtttatctcgccgtcgacttcgtcttcttcttcgaagtcggaatagttgacacgacgagactcagctagggtgattggcttggaagtggggacattgcttgagttggacccgggctcaccaactagtttgtcttggatcaacttgattcggttggagtttatcagggacttccatggttcctcagtcttggtgccgacccatgtatctttaggcttgcgcccggacattatgtctcggcggacgtaggccagcgctgtatccgaaagtcgatatgggggaagagccgacaactgcaaggcctcagtcgactcgaagaaagaccgcatgctggtgtaaccgtaggagtcgatggcgtcggggtcaagggcgatattgagcatggtgttgtatcgagcctagtccctgcgggacaaggacgcgagatcgtccgccaaatggccgttgtagctggcggcgtcgttggaagttcgaccgggctgacgtcccagccaatatagctgagggtgttcgtccagcttctctaagaaagcatagaaaccccaagtctcgatgcagaagctggtgaagaccatacgagcttgggtagcgcgcagtttgagtttacgtcggttagccaacgcgaggctggaatcaagcggggcatggaacgcccactcccagaacgcgcgacgatgcgccatccagaagcgccaatgatggcggtgtacatgagggttcttgactgggtcgtaccacagagcacgtcaggtccatggatatgcaatacgccacggcttcttgccggcagcctccgccttcgcaagaacagcagcgatggcttcccgcacatgcttcggagctttagcgctgccctcgacagttttgggagcaagaggcgccgagtctacggccaccggaaggtcctctgtcgctgttggcttgctgggagtgcgtgatttcttctgcggagtcttccgagccgatgtgatactcgccgccttgtgtttggacggagcaggggctcccctggctgactttgacgacttagtgcccgtaagcgggcttgcggactcggtcggcgctgacgtagtcgccgatgcagttgaaggaaggggcctcgcgtggggagcacgagccgagcttgcctggggagccggaggcgtcggcagcgccaaccctgtcccttgtagtactgcggtcgacttgccgtccagcacgtcttgggctaactggtccaggtgatgcaacccgcccgacatgggattgacgtcaagacgggcccgcatctcattccagaactgagcctgcaaggcacggacgcctcgcccgacccctccttgagcctcgctgtcaagaacctcgtcgataaacgctcggaagcgcctgagtttggaggcagtcaaccgcgtggacatgctgctgaactagaggcgttcctatcagtggtggattggggaataaagagagagctttgccgctccaaggcactctgctgttggctaggaaccggccgtatgactctgtgcgtctggcgtcattgtggttctggtctctgacgtcattcgtggagcagaactgcgggtacaggagtcagtccaagtttatctggagaggcgccaaatggaggaccagcagagagggaacgctgtggcggcggtactgaaggacttcaagatgcaggaggtcactcctgttgcgtgggcggcgacgggcattatactctggatcgtcaccactccgaaatgttacgtgggtgttcctcgggagtgcgcgcgagtacgctgggaccctctacttttttctctacacgtgtggtgataggttcatggaggcggcacgaagctcacaagcgcttgcgctacctccgtcggagtacgcactggccatgctggccctgttcttcctggtccccaaggcagtcttgaacgactacgaatcgcggttcggccccattgggcggctttacgcaaagtggattgaggcgttctaccacacaacgtgtgtgttcgtgccggatgctctccaattatcatgggactcgtcgtgcctttatgctcgagggattagtgaagcatcggtggcagtgatggacaggactggtgacttcgcgttcggagcttatgtgttcacgacgctgctactctctgtggcgatttatttgcccaaagtcgcgtacgacatttgtgaaggcctactattcggatgggtaggtgtcgttgttgctctactgctgctcgacgtctatatggagttcgacgcagcgtgttggtacgtgaacgggttagttcttttggtcggagcatacagccgtcttctgcgtcattatgagagacatcatcttgcagcagcaatgcagccaggtagcgtcgctgaacaagggtggaagaatctctggaaacgcgtgtgttcgcgcgaggaacgagagcgtgtcagcgtggagcgcctacgaggcggccctgcacgcgaggagcaccgaaactcgacccgatcgaattcaagtacagcttcaggtatagctggaacgccacaacctaacgcatcttccgatggcaccgcgtctcctggggatcgagccgtgcctggggaacaagcagagaatgctcgacgagggcgtcgagaccaagtcggggagatttgtcacggttctcccccagtcgacggtctaacactactcctggagagtttgaacacaatgcgtgcgctggacagacagaatgcaactactcgtgagtcacctcatgcgttccgggtgtaacgcacaccaaagaggccaggatacggtaggtcgatgccactgtggaccccgcgcagttgcgttccactggatactatgggagccgagccgtcggccgtgcgagtcagtcgtgatttttcttcgtaagcaacaacagcaacaaggtgacgaccgtggagtacctggggttccagctcagtgcacaaggaagggagcctgcacgaaagaagattgacgctatcatgaacattagggcacctcgaaacattagagacttgcgaagatttattggtatggtgaactactacaaggacaaggcaggtctgagacgatggcaccactcacagctttcccctcgagcaagaggccttaccaatgaacgatagtggaacaacgagcgttcgaacaggtaaaggagatggttgccacgcaagtactgcttcaataccctgatctgactcggccatttgatatttacaccgatgcgtcagcgcggcaactgggtggggtgctcatgcaagaaggaagaccgttggccttctggtccaagaagtgtaaccaggctcagcagcagtacagcaccaacaagaaggagctcttaagtattctggagatgctacgagaattccgacccattatctgggggcgagcaatccgtgtctacacagaccacaagaactccctggagaccacctttcgcaacgctcagatgctgagatggcgactcggaattgaggaatatggagtcacaatgtactacatcaaggggcaagagaacgtggtcgcagatgcgctatctcggttgcctctcagtgaaggcgcatcatcgaccggggcagcagttgaagctgttcagccgatgacagattcccccgtgttttccctctcgcccgttgaaatcgcagaagcgcaacggcaaataggcctggatgcaggacccgtagccgaatggcgcgcgattggcagcacaaaggtgctcgtcagcagagtggacgggaaagttatcgtgccaggaagtctagtgagcaaggtaatgtgaacctaccacgaatggctggtacaccccggcaagaaaatcatgctcgaatccatgcgccacgtcttgacttggcctggaatgacggtggacgtgcccaattgggtacggaattgcacggagtgtgctcagaccaaggtggaccgtaacaagtacggcaagctccccacgaagacggtcgaagcgcggccatgggccgaagttgcggtgggcagcattggaccttttggaccgaagaagtggcgagccttgacgatgatcgacaccagcacgaggctgctggaaatggcggccatggagaacggcgacagtgcagaggcgacacggatcatggaccaatgatggctaaatcggtacccgcgaccggaacgatgcatctgtgaccaaggcgccgaattcaagggggagtttattgaactgcttgagagctatggcgttgagcgggtaccgacctccgtgaagaacccacaagcaagtggagtggtggaacgagtgcatcgtacgatcaacaacaagctacgtgcagaacgaattgacacgttcagtgagtgggagaactgtctgtctgcggtgatgtactcactctgagctcagcaccacacagcgatcggaatgactccaggacaagcgacgtttgggcgagacgtgctgttcgacgttccgatggaagtggactggcagcagcaacaagagaagagagatgcgcaaagtgtccgtgcgagcaagcgggaaaacgagtcgcggctcgagcatgactacgcccccgatgagctcgtcatggttgcccgcggagacaagcgatgtaacagggttacacacacaagtggctacagtcacttgtaactctaacagacacgacgtctgttagaggttcgaaagactttctcgaccttggtgtagacacaccaaggactacatacatttacgatcaccatgacgggtggtccatagagactaaggattcctattggctgacagcagcatcttttagccaatgagcgacatgcatagcgtaggaattctgccaaccagccgttggtagattcccaacttagaatattacatttagaggaagtcagaaacataaaacaaaaatagcagttctcatttcggcaagcttcgcgaccaggttttgtacaacaggtattattcagatttgacgacaggtattatccagagataatttatcccgttttttattaccgtcatttcagcttttgcctcacagccaccaattcgagggggccaaatacagccacgtggcattcgacgtgcggcggttgctcggacctggagaccccatcgccatggcgcgcacccccaagacggcccatatcaaggcgcagatagccgagcgagagcggcaggaagaggaggcgcgcaggaaggtgaccagcgcgcgcaccaggtcgcagcgatcacaggcgctgcaggatgcccgcgactcacgggtcacgcagtttggccctcatgcgaccacaggaggcgccgcgcccactggtgatgacgccgatgagggggaagagaaagaagaggtcgcagaagaagaagaggaagaagatgaagacgacgacgacgatgacgaagatgcagacgaagaagaagatatagacgaagaagaaaaagatgaagaggaggacggatatgaagaagagggcgcgcagaagaagaaaaagaagaaaggaactaccaaggtccgacagcgccaagggaagaagcgcaccgtttgtgacgtggaagatgaggacctggtccatgttccagcgttcaaggctcagcatgacacgtggcccctgctcgacgtcagcatgcaggattacatggaggcgacgcgacagaagatgtcatcgcggaggtgattaacgtcgctcgccgcaacgcagacttgcgtaagcaggtccgcttccaagggcttccagactccgagattccgctcgtacctgacagatgggagccatatcagcgcaagtacatctgcacacacggctggaaggagcgtgagaggtcgacagggaagaggacgtcgcacaagctccgccgcacggactgtccgtttcagatgctagctcaagtcgtcatgcgccgagatggaacgtggggcattgtcatgaagcgcgaagtctacagccataaccaccccatttccgacggtatctacaggtcttatccaggtattcgccaggttcccgcaggctctgctctgatgccgggcattgagctggtcgacgccgacgctgggacttcaagcatctataactacattcgtcagaactccaaccaccgcgtcacaatggacgacgttcaaaacctggttgcacggatgcacaagaaaggcaagttattgttgtgataacatgagtagtctgtgaaactgactttattgacattgatgactaggaattgagctatctgacgacgatgcagtggtggagatgatcgtgaatttcaacttggagtcgccaataaacgtatcctcggtgcatgagaacgcgcacggcgagactggcgtgatatccttcacgaacggtcatatgcgcgctatgctggacagattcccagaagggattcaaatggactgcacgcatcagaccaaccagtgagtctccgtattatgtttgcaggttttggctacgtgttactaggttttgatgaggttgtgtctttgttctgagtagatataactaccagcttctcacgatggttgcgatggatcattacgggaacgggcagcccgtgcagtactcaccgatcgagacgaacagcgactggcacatggctaagtgcatggaccacttcaagcgggcgaacgaacactggcgcttcgtgcggattgtcatcgttgacaaggacatgcgtgagattgatatcatctgcaagaagttgccagaggctcgcgtgctactgtgtcactttcatgtgatcaagtggttgcacaaaacgattcgaaagtccaagaagtacggcgtgtacgaacaagatgtgctctctcagatgaaacacaccattaccaacatgacctacgctaggacgcctgaggcgtacacgtctcaacgcgacgagttcaagagtctcgctcacagagaagaccgcacagagctgtgggactactttgtcaagaattgggacaaatggtgcgagatgtgggtgatgacgtatcgtgtaaggctgccgcattttggcaatcacaccaacaatcgcgtggaaagcttgttcggaaagctgaaacgctacttgaagggccacctgactatgcgtgcatgcctgaaagtcctattggcctaccagcgacgaaaggaagaagagtacaaggccaaggtggagatagatgcccgggacgctgcgagacgtttcctactgtgagcagatgaacattgcccttggcatgacgacacgttgggtagctgcagcgatcaagacgcagtatgacgtcgcaacggatgactcaattgctgacaattacgcattcaaggacaatgacactacgctcaccgtccagtatgatgaacacgagtatacactcgagaaggaggacgggacatgcaactgtgagttcgcacaaaccatgaagctgccgtgcagacacgcgatggcgtatcggaagacgtgcgggaaccctctgatcattcccttctcaaccatatcgcccaggtatgtccaggtttcacctatgtattgaccaggtattgcaagttggttcaggtattgaccaggtattgaccatgtttgtgctgaatttgtagatggttcggccagagtcgcctctcacaagatgaattgactgaagttgagcagccttttgtggcgaaggtgttcaagaagaagcctcgcgctgttgctggggctttgagcgaggcggaaaagtatcgccgagcacagcaggcatttggccgtatcagtggagagctcgcgcaggttccggacgaagtgttcgagtctgcaatgagcgaccttgacaagtggtggtacaatctgagcatggtaagacggatctcctgccaccctcatcctctggtgacgatggctcaggcagtggaggtggtggtggtgggaacgatggcggcgctccgggtgggagtgcgtcccagggagagggcccgcaagaagatcatcacgatgacaatgccgaaaaagggaacatacaggacgaagacagatctgacgatgaggcaccgacgcaggtcgtcgattcgacaacccaagctgccgataatgaaggttgttcacgcgggctaagcgttcgactgtcaggcaatgtcagacggcaaggccgcccccctctcgaccgtgcagcgcagaaggaaaaggcaaaaaggctttgaaggagtacaacaatggcacaaacctacggactttattacgcgaaaagatgtgtgtgaagtggtggctacacttcacgatgttaaacccggtgttcgtgaggtagggtccttcctggctacgttgcaagtgaagtctcaagggcaaggcaaacccattgattggcgtgtcgacgctgaattcgtcccgggcacagtccggtttcgtataccggagtctgtagttgacagcgcgcaggagcaacttctcggcggccttgcgaataacgaacagatcgagctgcaggcggcgattgttacgtagcggctattgctaaggtcggccagttcacgcgtgaccaagtggagtcgatgaagtggttgtggaacctacaagctacatgtcgggatgctgtaatttgttgctcgtggcttcaccgcgaggtaagagctgctcatgccccccctccctctccgtgtgccggtgcatttaccgagctattggagaactcgccatacaatgaactgcgcggcttcggattcgacctgacgtactcggatctgtattgcttgcgcgacttggcctggctaaatgatgacgcgatgaaggcatttgctgtggtgctggctagctacaagaacaatgtgacgattacggccacgccgcaagggcatggtgaggctacacaccagaaacgaagtcgtaagggcctgctttcatccaacgcactggatggcgtcattgcaggtgttcgacgtatgcatttgtgctgctgcccgtcaatttcgggggcactcactggggatgcctcgttgtcgaccgagatgccaaacaagtgaagacgtacgacagcaagaatggcaagcgcgataagcagaggttgaagaagatcgcgagcgagattattgcttcagatgcgactatggcgagctacacgactgtcgaggggaccgagtctcttcagcccgacagtgatagctgcggtgttttcgtgtgtggcttcttctggacctgtgttagcgacgacgctccaagtgatgtaatgccgacgggtatcaccaagctacgctgggcaatgctggaagcaatcctaaagacgaatcgtcgctagtcgcaagaagatgacggaggcatagtgcattttgaggctaaactcaatacatggacactacgtggatgacatctggacaacacctggagttacgtgatggagccatacttgagtgatggcttcacttgccggttctcgccatgccgacggaagtcgacgctcatcactctggcttttgctcaagcagcgcacacatgagtactccaggtattgatacctgcacgaaacccggactctactgctgaagactgattggctagagctcttccgacacgagccgagcgccgtcacttccacttttgctcaagttacgcacacatgattcttccaggtttttcacgcgcattataccttgtcaggtaatttatgtcggtcgcatagattactttcatcggattcggcagggtttcgaaaaacctgtagataacctggaataaaacttgggcaatacctgtggaatcagttttctgagaaaaatctgaatctgggaaacctgggcgctaaggctgtccttctcattttaaccctaaaaacactatttggatcgtttatttattgtgcctttcacttcttttggcaaatcggacttcggaaagtgctcgcttagagagagggctgggttattacgtctgttttgacggtgattggcaccacgaatcaccctcgtacttaaaataacatcaaattttacccagtcacagtagcggaattctcaaatttcctccaattatatagcttcatgctccactcttgtgaagacctacggagctagtcacaagctcgggaaaagcttgaatggccgacactcgtccggccattttaggttttcgtcgctacagaagagttaaagatgacctactcaattgacatgcgttggagagggatcgtgctcatgtacgtatattccatagacacagcgacagtagctagtgttctaggtctatcggtgcgtagtttaggccgctggtagcgtcgctttcgtacgacaggaaacatactgaagaatgaaccaagggccaagacgtcaagatggccaagtgaggtgtgtgcatttgtacgatcgtatgtacaaaaccacccttgcttctacttcgaggagctgcgcctcgagctgcgagataacttccgagacacgatcagcctgtcggactcaactatctgccgagcacttcgcttcgacctcaacataaccaggaaggagctcacaaagcgggcacgagaatgtgtgcctagtgagcgccgtgagtatgtcgctggcttctgcccttctatagtggccccgaccagctcgtcttcattgacgaaacgtccaaggatggaaggtttatttcatacttgaagttttattactgggaattactgacctaaccaaattgatgcctatcttaatgctcgctagatctcttcttcgtcggtatggctggtcaacccggaatacccctgcccaagtgaccctaccgttcagtaggggaaaacgagtgtccattttggccgcaatggacgtgcagggcttctttgggtggggcaatgtggagggtacgttcacgcgtgttgatttccataacgtgtttaaggaaacaatcatcccattcctcaacccatggcctttgccgcgctcaattgtgatcatggacaatgccaagatccacatgtacaaggaactacaagagctcatccacgcaacaggggctttattattctttttgcccccgtattcgccagacctgaacccgattgaagtggggttttccctcctaaagcgctggattcagcggcacgccaacatggcatttcgcgaagacccacttgccgtgctgaatgtagcgatgtacaagtgtactagacagaaagaagaagtggggcaaaacttatatagtcattgcggatacaaaccaaatgacttagcgataacaagctaatctagtacacacgctcgttcgaatgtgtgtggttttcctcttattgctccatcgattcgacattcgggtctctgtgctccttagaaactcctgcttgcctcaccgtaatagcttcgctctgcattggagtcgcgtcacaaggctagcatcctgactcagcagtagagatctagaatcggaagggggcctcctatgtctgagcaaagcaagcgcacaatcgagaagcacacacaccatcaagccaaaggcgcatacactgactcccaatactcgctgctccgcattaccagctgtgcttacccttgtcgcctctgtggacacgtgtatgcaagtcacatgcgcaccgacatgccttttaatcgcgctcaccttcaccctcactgcatctgcggataggcacacacagcccacaaccacgcgcacattgcctctcaacgcagaccgcgtgaggaccaaagtgtgggtaaagttttagcaggatacaaggcgccagacatgcctgtgtcaacgccgactatcggcgatctgcagcatcgtctctcggagtccgactttgggcaagtcgtcacgttgcggggcgagctgtaccagcatgtccttggctccccggacgtgcggtacaaaaatagccattgaggtagttgatgccaccttcgctgccctcttgatgcatctgaagacagttctcgacgctgcacacagtacatcggccgacccaactgtgcagcttacgcgctatgagtatcatctgcatcgctcgatcgcatcgacaaacgcgcttcttggttgtcgcatcagcatcactacgtactgcgaatggggcgagcatctcactgcgcactggcgagcaacgaaccacgcacaagtcagcaatacagttagtggaggcgatacgttgctcgcatcgacgatggagaacatactgaagccgttggtcgagataaatgagcggcttgcgcgtctggaagaaaccaagccatcgacaacagacctcattgcagatgctaacgccggcgcaacttcgcccgctgccccagctccaccacctgctccagctactgcctctacgctggcaggctgcgcgctcaactggtacatacaccaaatatgggaatctgtgaaaggtaagaaggaacaaaacaagcgggcagacgcaaaagcagcagtgaatagcatgctcgtactgtaccagactccttgcacaatcctcaagccaccgcatcgatccaacggcgacgcgtaccagacttggaagcacgacctctgggagctggcgctcttgctggatcacactgctaacgagcgtcttggcagcttcgacggcaagaagccgaccacaaaagcttcgtcgctccgcaagcgctggcgagcattgcgagcatcgcatccagaggcgtacaaagcactcggtgcacagtatcttgcgttgaaggcgagtggctccatctccgacgagtacacacctgcaacgcatcagtggacggccaatgatcttgcgtagcgcttggcctatacaaaaagtccatatcatgcatagcagaaacaaaccacatacaaatacatacaagttaaaccaaccaagatgctggaggccgggatcgaaccggcgacctggaagcgaggcttcctgctcttccgctgagctacaccagcgttagtgaatgaggggaagttgcggtcgtacctcgatcgaaccggtcattaccttggggcgcacccgtctccgtcgtcacgatgaccgctgctgctgcgtgccatcgactcggcgctctccggcttttatttcagctgctgtgtctgcttaccagtgtgatgctttgtctggcatacttcaactacttcgcgtcgaagcgccgagcacggctccgcgcgcacctgctccttcccggccgcttcatctccttcagtgttctctgctgcaggtttgacaggtttccggattccggtccggaatctggcaattactgcaatcttgacaatcccaaaaacaaaagattgcaatctaagttatcgcttgtatttcctctgctaggttcatatttttactcgtttggcggcgctatcgccctaagatctctgcttattcgattgcatacgtgttaaccttcaaaagccttggcaaaaagcaatgttgggtcttgtattcatcatgttgagcgtggcctcggaaattcacaggcaagaagacaaattatccaagtaatattgcagggggagtggtttgtagtatttcgctgtcacaccgaaacgggtcttttgcgcgcttttatcccggttgccaagcgttcctagagcgttttcaagcgtggaaggacgacaaaccatgaaagattagagtccactgcaagtagttagcaagaatagctcgtgacgaaggctgcgagatgccgttcttcttacgaatatactgtacatcctagccgactttatccatggcagcgagggaccagtcttcaaccccacagtcgtgcagtgtctgctgaatgcgtttgcacccgagttccaccgcacccgctatgatccggcgtttgcgttctcgtggtacttcgtcgtctgtgaagaccagttgcaccagcctcttcaggtgcggagtcttgtcagcatcacacaaagctgtcgaaattgaagctgggggagcgcgctgcttgtcgtacagcgacagcatcaagtcgctgttctcacacgtggaagcctcagcaaaagccttgcccctcagctcatcggagatgcgcgtgtcgtggcacagcaaagccacgactcccgcgtgaccagcatttgctgcacgaacaagcgcctcgcccagcacctcgcctggtatgcggctatcctcgtgcaagagcttcacgatctcagtccgattggcatcgaaagtgaacctccagtactgcagtccccagccagaagctttcttaaacgcagcaacgatcgcctcgtcggagatgcgctcgttctcgtagaggaacttcacgagttcggcgttcgttgcatctacgaacgctcagtcaacagaagacggggtcgcatggcgtgtactacagagaatcttcatcgtgtcggtgttgttccgcaaggaggttgtaacggggttacacgtaggttacccttttggttacccttttggtgtgcgatacaccaagtgttactccctgggccactggccagtcattgagaatgaactagagttagttatgtcgatagtaagtgcaggtatttgcaccgtaggcggcggagccgcagataagagaatgaatacagtttgccttttgcaagaagtctctaacttgttttcgtgggtcctcggataggaccctgtagagctctttgagtcgtaaagtcttcctctacgcaaggagctacggcaggcccgctgcacttggtagcactcgtagtcaatccctcacctgagtctgttagactgtacctctgtgaggatggagcaagctgcgttcgcgaatttggcccccggccagcaggaggcgcttaaaaaccttatgtctctgttgggcccggagggcgtggcgcaccttgcctcgcaaggcccggacgcgatcaacgcgcgtctcgaggcgttctcaagttacgagaatgctctgttggagcacatccagcagaggatgagcgcgacggcgcctgcagcggcgtcggccgcgtcgcaagccggatcgactcgacccaagccactcatgctgagtgtctagtcgttcgagggtctggagggggagcatctcctgctctggatccgcgagatcgaaatggccatgggctctgccctgcttcaatcggagcaccagcgcgtcgcgcttgtcatctctaagctcagcggaagagctcgtgagtgggcgcttaccagcgggtcgtcggtagaccaagccttcccgacatgggatgagctgaagcgacagctctcacgagtgttctcgccgccgaaccacgcataccgcgtgcggtccaagttcctggcttgccgtcaggggaaaaaggacttggtggactacgtccaggagctacgcacgctcatcgccggcatgttcgctgaaccgctgcctgagtctgtcaccatcacggtgtttatggatggtctcaggaccggagtggctcgcacagaagtgttccgcagtcgtcctacctcgttcgaggaagctgtggctgtggcgttgaacgccgagcacaatttcaagtccgctcgcgtcggctggagcgcgccacaggcgagtacgtcgaacggtcctgaacctatggacctcagctacgctgaaagtgacgaagccgagcttcgggctgctgagcagcgccgcggtatccgccgttgctacacctgcggcagcaccgagcacttgcgtccgggttgcccgctgcgcaaacagcaatctgctcgttcgagcggccccgctttgagccacaaggctggttcgtcgcggggaaacggcgactcccagtaggcgcggggcggcctactggtgaagaactaggttctgtagtgcctcagggagggggaggacaacggagtctagtcccgaagagagccgtactctcaaacacggaacgtaaatgcaagccgggcttgctggtcgtcattgcgactgtgaagggcttcgagaagccgtggacgatcttgattgattcgggggcgtctggcaattacgccaggcgttcctccgtggagggcagcgagttatatgctgtggcgcttcgcgcgcgttctcgtgacatagtcactgtccgtttggcgacgggcactcgtgtcacggtgcccaaggtccccatggacttgggcgtcaagttccttgactttgacagcacggaacgctgtattgtcttggacctggattcaaggtatgacctcatccttggcatggcgtggctggaacgccatgagccttggatagactggaggtcgaaaacattaggtgctacgcacttctctcctggtggggctttggcgagtcatgaacccacctctgccaggacacagaagcgcttttggcgcgagcactggaccgagtcggtcgctgtgctggacatcggtgtgtccgagttggtcgacaacgccgttgttggagaagcacttcccggagtgggcgcgacgtcgtatacgtcggccggtctcgagcatcgctcgtcggacgtttgtggggcggcacgtactccgctagttcaggggcgtttaacgcctggcgacggtatgtcgcggcactcggagctcggctcccctcgtgcgcgtgggatggcacgtaatccatcgactttggggcgttcgacgctaggcgacggtttgtcgcggcccattgggcatggccctgcgggggacaaggcggagcgtgtctcgcctggtgctttcatgaccaaggattgccgtgttggcgattcctcgctggcgtccacgatggacggaggcgcgttgtcgcctggatgtggtgacgacgctgtcgccacgtctccctcatcctctcggcctcgggcgcggaggagtagtaggaagagacgcagagcgtctgcggcgtcgagcgtgtcgagcgatgaagctccacgcgagtgctgcgagcagctatacacgctcgtgaatgggctgacgggagacgtcaatggtgacatcagccttgaagctcttccctccgtgagtgctctcctcgagcttgaggagatgtccgtcgccgagtttggcgaggccttaaaggcgggcgatctagccgaagtggtcatgatacgaccagaagaagagttaaactcgtcgtcactattggacgaagcggtcctggaggacactaagcaggcgcttaataaacgtagtggctcagccatcttgaaggatccgtcagatccgttgtacccgttggtagtggagttcggagacgttgtctcgaaggacccgcctatgggcctacctcctgatcgaggcgttcgtcatgaaattgacttggttccgggaaccaaatattgcgtcacacgccagtggccacttcccaaggaacagtgtgacgtcattgacgccttctttcgtgccaagaacgaggcaggactggtgcgcgaaagcaagtccccgcactcgacgccgacattctgtgtcaggaagccgaacggcaagtggcgcattgtacatgctttcaacaagcttaacgcggccactatcccggcacaaacgccgatacctcgcaaggatgttcttcagaacaacatggttgggtgcacgttgtacagcgctctcgacttggtcgatggctactatcagctgctcatgagagcgagtgatatccctctcactgcggtgagtactccgagcagcatgctctgggagtggttggttatgccccaagggctgtcaaacgcaccggcaacgtttaatcgtcttgtgatgcagttgtttcggccgcatcgcgcatatgcgcagacgtacgttgacgacatctttgtccacagtcgtgcggagcacgggaagtcggatatggagaaccacatcgaccatttgagagctgtgctcgagtgtatgcgagcgaacaagctctacgccaatgccgacaagtgcatcttcggcgctgaagaaattccctttctgggatgcttcattgggaagcgtggtctccgagcggaccctgccagggtcaaggccattgtggactggccggttcctgcgaacccgaaagacctgcgcaagtggctgggtctggcaaactatttgtacaagtacagcgagaattatgctgtgttggcacaaccattgtcttaccttctcaagaaggatgctgaatggtgttgggatgccgagcagcaaagcgcttttgaagcagtcaaggaaagcctgcttcaggcaccgatactggcgctgccagaccccgctcggccgttcaacgtcgtgtgtgacgcgtccgattttgccattggctgtgcactgcttcaagcagacgccgatgggcgtgagcgggtcattgcgttcgagtctcggcagctaaatgctgctgagaagaactatcctgtccatgacaacgagctactcgcgatgaagtatgccctcgtcaagttcagggttcatctgctcggttccaagccgtttgtgatcttcacagaccacgcgtccttacgcactgcgacacagtcgcctcacctctcgcagaggatgacccgttggctctcgttctttgcggagtacaacttcgaggtgaagtataagcccggttggcagaatgcgctggccgacgcgctgtcacgcaggcctgattacgagctcgctcacgtcacgagtgtgacttcgtcgatcactgacatgatccgtgccgcgtatgcacgtgatgagagttgtgtagctttgctacggacgctggggagcgcggagtttcgagactcggacatcaagttgtctgcgcggttgcgggcgcgattgcatcgctactccctggatggggatctgctgtattacagcactggatcggatgacacgccccgcgtcgtcgttcctcacgacgaggaccttaagcatcgtatcctctatgaggctcacgacgctcccttgagcggccaccttggtcgcgaaaagacctacagctctgtgagccgccactactggtggcccaagctgtacaagtgggttaagacgtacgtgagtacctgtgagtcgtgtcaacgggtgaaaccctccccacattcggcggcgccgttggcaagtttgcctgtcccgtccgggtgttggcagtccatgagcctggactttgtgtttggcttaccgaaggattcggcaggcaacacgggagttgtggtctttgttgaccgtctcagtaagatggttcatctggcggcggtgccggacaccattgacgggtctggtacagcggagctgtttatcgaccgcgtatttcggcagcatgggctgcctgagtctattgtctcggatcgagatcctcgtttcacggggaagttctggacgtccgtctttcaggtgcttggcactagtttggatatgtccacggcggatcacccccagaccgatggtcaaactgagcgcgcgaaccgcgtcgtcgaagatgttcttcgcagtgtctgtgcggagacgcctaagcgctggagcgcgatgctccctctcgttgagttcgcgttgaacaatgtggtgcatgcctcgataggcttcactccgttctccgtgaacgggcttaatcaccctcgcgtcccgttgacgccgtcacgtagtgactctgggcttggtaggggagagttagccgataggcttgctgatgtcagccctcgtgatgttcgtaaggaactggacgacttcttgtcgatccgtctgaatatcttaaggcatgtgcgagacgcaatggctgatagccacgacgttcaaaaggaacaagctgacgctagaggccggggtaacatggaaaactttgaggtcggagacctggtgttattaaacgcgaaaaacctacctacacatgccgtttctgcggtcttcaagactaagctgcgtcctcgcttcatcggaccgtttaaggtcgtggccaagaagggccttgcgtacacgcttaaccttcccaagaagatgcgcacacacccagtgttttacgtgggcttgctcaagcgttaccgcgacccgagccaggtgagcgcggaggcgctggcgccggcaccgttggaggggcagcgccccgctgcagctgcaccagcacgtcaacctgcccgcgcaggatctggacttggtcgtgcagcgcctgaacaaagagctccaaccgacccatccggtcatccggtggatcttcaagatcgtggagccgacgctcaacagcgcggagcgcgtcgtcgttctgcgcaaactgcctcccgacccagtcccggtggtcgcgcccacgcccggcttgatattccagctcggacaactgcgctcgcacagccgcagggtttagcggcggctcgccaacctcctgctctgctcgatgagcacggagagcttcacttccatgtggagcggcttctgaagcgacgtcgtcaccggggtcatacccaatatctggtaaagtggcggggcgagccaccgtcgtgggagtacgaggtgcccctgaggcaagattgcctggacgccgttgacgcttttgatcgggagcacccgagacgctcatcgagctcgaagccaactcgtcggtcgcctcgcgcttcccggcgctagtacgagacgatgacacatccgagcgagtgctcgagtgcgaagcgtgagctggcgccgcaggtgtggacgtagacgcacggcgcggagtatctcgaaccgcacgattggcgccttgggcgcgtggtctttgaccatggcgattttgttggcgggccttcttcttcgcccacatgaagcggaggcgccgttcaagaagaacatcttgctttctatagcttgctcgaagagcatcaattgacggcaacttacgggaattctcaacccaggcctggaactggccatcatcttcatcttcggtctcaccgggaacgaggaccatcgggatgcgctgcatctgaggcactgactggtcgtgcagttgaccatccagccgggcgcaatactccgagggagtggtctgctgcggcgtcacatagcgctggccagcgcgaggcgctcgtctacatctgccgttgtcgaggctctcggccctacgatgtatgaacccagcaggcctttggcccagtcgttcgcgatcttcaatggatcttcgctgcttgtaaagccatagtctctccgagaggggttcacgataggcaacgcctccggtatgttcgagcgcgttggcacggtgcgctcttcgagctgacggtgctgagccttgtccagtgggttggagactgtgtcgggatccgtcggatcatccccgtccctcggaggcagaggtggcgcatggcgcagcgggtccgggtgtaagtgcgacccccgggtctctgaccttgggctgatgaacgagtgccgcgggggcgaacgcgctgtccttgaagggctgtgcccactccgcggcgatctgccatcgccttccgacgggttggcgttgacctcgccctcctcagacccgacgagatcgtcgtacgcattgcgcacacgccttggcgcctgctcgccagccgggattgagctatgctccgacatcttcgctggcggcagcttcggagggtgcgctgcacgatacttggctatggaaagcctctgcagggtgctgggcacgggctcctcctttgcgctcggcgtctgtgatgactcggcggctggctcgacggacgggctgtgccctggctgcgtggcgctcgtgcgcgggccttgtgactgctggtctgtagacccgggggctgcgtgcatgcgttacacgcgcagccgattcgacaatgaggctctgtgagcacaagtcgaactcgcgatgggtctggaccctaactggaagatcggaatggtccgtgctttgaagctggcgtgttcgccgtcttgatgggggagagtgaacggggttacacgtaggttacccttttggtgtgcgatacaccaagggttactccctgggccactggccagtcattgagaatgaactagagttagttatgtcgatagtaagttcaggtatttgcaccgtaggcggtggagccgcagataagagaataaatacagtttgccttttgcaagaagtctctgacttgttttcgtgggtcctcggataggaccctgtagagctcttcgagtcgtaaagtcttcctctacgcaaggagctacggcaggcccgctgcagaggtagccgcatcctacatggcctcgctaaacgtggccggcaacagtcgattggttccgagtagaaactccaccgtggctgtgaatcctcgctttgcggcgctgacaaatgcgtcgttgactgcatcgggatcatttccgccgtggttgtacaaatacttgacggcgttggcccagccgtcacaccacgtcagctgaactaatagagggtaatttttgtatcttgtatacgggaatgtctcgagacaaacgctgagcactcgatccacaagagcatcttgaccagcttcgactgccacgacgtagacccccgccaagtcccaccaagctccgtccagcccaagcaaaaactcgaccacgtccgcccagcgctgtgggaaatattattgcgattgtaatattgtcaagattgtcaatctcaataattgattgttccgtgatctcaatcgacaatcccgttcccatattgtccctttactgattttgagcatttgccagtgatccggtagagcaatttgcaacaccaagcccatggaaccgattctagactcatcaaagccattctgtgtcttctgctacttcgaaatgcgagaagaagagatcggtttcaatagccgtaacaggaggaagagccggcgtagacgttgatgatactttatcgtcacacgcttttggtgctccctcttactgctatggttatgaacctttttgtaccgggccatggaccgactccaaagatcgaaagaggcaagggactactaccgtactaccgggtaaccagggaccgttatacttcttcaatgttccgcgttagcagacacaaagcaggcgccctgttactgaaccgacttctagtaagagtccaacacaaccccgaaggttaggtaccatccggtctaggcgtgggccaagccccaatgcggtatttccacctacccacggcgtgatgtacccacttcttcgaagtgtgctcccacagaaaactgcacgtttgcaacctagagcgtcccactatgtggctatctccaatagtctcaggtaaactcgcttcggaaggtatccccacgagcaacctagtcttgaacttgaaccgaagcttgaccaacaagtgctactatgtcacacaagccgatgcgaagacccgaagcttgatgagcgcagtggcgagcgctcgaagaacacttgagaggaagttggaaagttgaaaagtgattgattgatccgttagtttagcgtcggcgcgccgccgccgcgcaaccagtagttcttggcgaccaggacacgcaaacaagtatccaggtcccatcctaaagtctatcaatctcaaatcctagatcaatccttatctaccaatgaaaaactactaatcctattcgtagtttggccaaaatttgtgacttgcgtcccataatcaaaagtccggctggaaaacttgattgttgcacatctcaaggatttacagccaatgaggtcgtgcgaatgtccatgtttacgcgtcccataatcaagtttacttttgacaccagccaataggatagcatataatgaatataaaccatgcatccccgtattacgctggacgctggacgctggacagcgtaaactgaagtgctgtgcagcagcacttgacgtgggagtcctctgccatctcattggcagacggacgtccacgtcacaagtgctgtgtgcccaatgcactggtgcctgctgctgcgaacggccacctggagtgcgttgacgccttgctgaacaagtttttcggcgaagaaacaatccaaggcatcgtcctaaaccagatctgccgcgaacaggtcgctgaatggagggaattgcagcgcgcagtcgttgccgcgagtggcaggacggacctcaacgtattgcagcggctctgcgggacgttcaacccggtgaagtagaaggacttcagcacagctcgagcggttttaagcgacgcagcagggaatgggcatctcgacgtggtcaagttcgtagtgcaggacgcagggccccgcactatacgccgtatatgaaggaatcggacgctctgagtcgcgcgatttcggggcgacacgcggacgtggtcgagttcttgcttgcgctggacggagcttggtgggacttggcaggggtctacgtcgcggcagtcgaagctggtcaagatgctcttgctcagcgtttgtctcgagacattcccgtatacaagatacaaaaattaccctctattagttcagctgacgtggtgtgacggctgggccaacgccgtcaagtatttgtacaaccacggcggaaatgatcccgatgcagtcaacgacgcatttgtcagcgccgcaaagcgaggattcacagccacggtggagtttctactcggaaccaatcgactgttgccggccacgtttagcgaggccatgcaggctgcggctacctccttgcggaacaacaccgacacgatgaagtttctctgtggtacgagccatgtgaccccgtcttctgttgacagagcgttcgtagatgcaacgaacgccgaactcgtgaagttcctctacgagaacgagcgcatctccgacgaggcgatcgttgctgcgtttgagaaagcttctggctgggctcttcttcgacggcggttcacggggtaatccgggccggggggatcaggctcaatcataatacgactcggcggtggcgctgagtatccagtcatcgagtggatggcaagcgtatcgtatgcttctgcctccaccacgaacaatgttgcggaataccgagggctactgaatgggcttcgccaggctgcacgttaccggcttcgtggcctgcacgtcgtcggcgacagcaagctaatcattacgcacctctcacggagacggacgccgaaggccccgcacctccgccatatctacgagcaatgccgtgctcttgctgaccaactccagatcatctcatggacacaacatctgcgcgcactggctaatatcgccatgggcaccaggacaagtacgcaggttctggaggcagattttggggtactgccttctctctggtcacccatagtcgagtcccttccaggggacatcgaccaatggttaaccgcacacccggactcatgcgacggcgcaaacgccacggaccggcccatactcgcaggcgcgcaagataggtgcgcatgtgctagcacccacaagtagttagcaagctagcagaagatgtgtaggcttctgctggacggacattggctgagttgttagcaaagactaaacgactgcaatgtacctcaccaaaaagaagaagcttctggctggggactgcagtactggaggttcaccttcgatgccaatcggactgagatcgtgaagctcttgcacgaggatagccgcataccaggcgaggtgctgggcgaggcgcttgttcgtgcagcaaatgctggtcacgcggaagtcgtggctttgctgtgccacgacacgcgcatctccgatgagctgaggggcaaggcttttgctgaggcttccacgtgtgagaacagcgacttgatgctgtcgctgtacgacaagcagcgcgctcccccagcttcaatttcgacagctttgtgtgatgctgacaagactccgcacctgaagaggctggtgcaactggtcttcacagacgacgaagtaccacgagaacgcatgcgcttgatcatagcgggtgcggtggagctccggatgcaaacacctccagcagacattgcacgaatgtgggattgaagactggaccttcgctaacgtggagaaaggagcatgaacggatgatatcgatgcagtgattcatcaatggcctcgacaaacaatatcaacagcaaaattgaggtatacttcaagacgaccgtttaaactgcacctgctgtcatcgttcaaatgctgaatccgttgttggcaatggtttgcttgtaccagtacgacgacttcttcggcacgcgctcctgggtctcgtagtcgacccagaccatgccgaaccggatgccgtaacccatggaccactcgtagttgtcgaagaacgaccacgcgaagtagccacgcacatcagccccctccgtgatagcctcgtggacgttggcaatgtactgccggtagcagtcttcgcgctgtgtgtcttgctgcgcctcctccttggtcacgtccggccacgccgagccgttctccgtgatgtagatgccgttcttcggctggtacttctcgtggatgtacacgcacagcttcttgagcccccacggcgtgacataattccacggagctccggtctgcacccaagtcgggtcctggtacccggtaacaccttcgtcggcctcgagtccacccgtgttgtcgttcggaggcgcaatacccgcgtcgaactcgggcgacggcttgacgtagcaggagctgtagttgtttaggccaaagaagtcggagctgcccttcagcagcttcttctgttcctcggtgaacttcggcaagcgatcaccgcaacggtccttcatgatctgcgggtagtctccgtagtaaaccggctcagcaaaccaaccgaagctccacgccatggcgcgctccgcagccgcaatgttcttcttcttctgctccgggtcgtcggtggggcctggttccttccactcggcgctcagcgtgatgccgatctgaccaccctgtgtttcctggaattcctgtcggtagacctccacggcgcgcgcgtgggccagcagcatgttgtggccggccacgtacggctcgaagtgcttgttgtgcttgcgtccaggcgccatcatgcccgtgccgaagcccatgtagttggccacccacggctcgttcatggtgatccagttcttgactcggtcgccgaagcgctcgaagcacacgcgcgcgtactgcgcgaagtggtcgtggatctgctcgcccaggaacccgtcgaactcggtctgtagcgccagcggcaggtcccagtggtagagcgtggccatgggctcaattccgttggccagcagctcgttgatgaggttattgtagaactggacgccctcctcgttgacgtcgcccacgccggccgggatgatgcgcggccaggcgatggagaagcggtaggccttgagccccatgctcttcatgagctgcacgtcctccttgtagcggtggtagtggtcgatggccacgtcgcccgtctcgccgttcttggtcttgcccggagtgtgcgagaaggcgtcccagatgctcgccccgcgacctccctccttcacggcgccctccacttggtacgaggcggtggcggcaccccacaggaagttgttgggaaagcggatctccttggccatggcgaggtcgagcgtcgaagttgcggagcttgtgcggatccggtggaattgattaatgaggtcccgagtcggctgacgtcactgctatgtgatcgtcgtggagatcgttggattagtgacttccattcacgtctggttgtcttgctattatctctgcaatgaatcattgcacaggttagggaggggtgtcatccctaatgtaggatgatgaagcacaaccacagctggtgaaaatggctcacttttcagcgtggttgaagctgccttgcttctgttgaactttgacgatttgaactcaagtcaaacttaaaggcaaaaactcactcaaatatgatgatgttttctgctacctattcgtgcgaggcaactctcctctcttcttgtcctgacttcggaggtagggagcgttcccgctggtacagtactgtacagcacgcttcccatcaaggcttgattcaagcagctcggcttgatcttttccctgccgattcgttattcgcttccgccccgccgtctacgcggaggtgctgaatccgtttttgcgcacgacgtcaccgtaccagagcgccgacttcttgggcgtgcgctccatagtctcgtagttgacccagtgcagaccgaagcgcttggtgtagccctcggcccactcgtagttgtccacgaaggaccaggcgaagtacccgcggacatccgcgccctcggcgatggcattgtgcaggcccgtgaggtactcttggtagaagcccacgcggaagtcatcgttctgggcctcctccttggtgcggtcaggccacgcgcatccattctccgtgaccaagatgccgttcgggactgcgtagcgcttctggatccacaccagcagcttctggaagccccagcccacagcattccagcccatgtccgtgtgtctccaagagtcatctgacgtcagcttcgtgccttcgtcggggccatagccaccagtggaatcattaggcggcgggatcttggcctcgtactcggcggatggctcgacatagttggttccgtagtggttgagtccgaagaagtccgagctccctttcagcaacttcttctcctcttcagtgaacttgggcaggcgcagtccacagcggtccttcatcacctgcgggtagtcgcccttgtacacggggtcagcgaaccagcccagcgcaaagagtagcgagcgctcggcagcctcctcgttcttcttcttctgctccgggtcgctcgtcggcgccggctcgcgccagtcgcagttgagcgtgatcccgatccttcccctctgcaccgcctggaactcgttgcggtacgcctccacagctcgtgcgtgggccagcagcaggttgtgcgccgacagataggcctccgtctgcggcttgcacttgcgtcctggcgcgtggataccgatcccgtagcccaggaaggccgagcaccacggctcgttgagcgtcagccagttcttgacgcggtctccgaatcgctggaagcacacgcgcgcgtactgcgcgaaggcgtcctggatgaacttgccgccgagccagccgtcgaactcggtctgcagcggcaggggcaggtcccagtggtagagcgtcacgaggggcgtgatgtcgttggccagcagctcgtcgatgaggttgttgtagaactcgacgccctcctcgttcactttgccgacacccgcagggatgatgcgcggccaggcgatggagaggcggtaggccttgagccccatcttcttcatgagctgcacgtcctccttgtagcggtggtagtggtccacggccttctcccccgtgtcgccgttcacgaccttgccgggcgtgcgagagaaggcgtcccagatgctgtcgcctcgtccgccttcgtccacggcgccctccacttggtacgaggcggtggccgtgccccagaggaagccgtcggggaacttcagctgcttggacatggctcagctgtgtcttctactggggacgcggtcggtgcggtgccttggatggagcgaaagcaggaatgagcgagcacagctacgtgagatcttgagcgtcaggttgaagcgctgggagaatgaatgttttggccgatgtatttcgcacttaagacgtcaggggtacgtggcggatttttcaaggatctgaactcgttgccgtacgcaaagctttttttttcagtctcgagaatgcttgcttctctattatagcaactcaaccgcgtgagttgcatcggctgtgagcatcatggatgtgtggaagtagatgcagcagcgcctcgcttgaaaattagtgccggcgctctattccattgaaatgcagcgttggcggagaagtgcgttgtacgtggcttggtctgattcctcctcgtggtacgaagcacgcagccgacgtcggactattcctttgctcatggctcgtgtcgcgtgtaggactcgatccgcgcggcgtatctctctagcctaaccgccggcaatcgctgggctactagcgttagctcttgcagtgtgccagcgtgcgacgaagttaccattcggaggttgccctttagacatcgtcggcgtcgagattcaagcgtggggaacgactcgagaacgccaggcagccaattgagctgcatcacgcgcaggtcgcgttgctctggtacctgtcgcgaaccgtagtgaagtgccaccgcgtaaaagtacagcctgggtcgcctggatggagctccttcgtctgtaccgcgtacttcaatccatgtgtagcctgggtcagtaggcagcaccatcttgacgctgcgctctgaatcgtcatcgtgtcggcacgtgacaatttcaaatttctcgatcccggtacgttgtcttggtcgctcttgaccgtcttgagctgcttcgtcctccccactatcctgccgctcaaccgtaatatacccagatatgcagcacccagtaacgagggcgccatccattgagcgaaatgcgattgaaatgttgcacgattctcgtcgagaaggttcaggaagcgatcgaatcggccgcagcgagtgaaagtgctgctgcaggagctcttgcatatgaatcgacaccgacgcttgcttcacgaggtaataatccgtctgcgcatctgtaccggtcggcacctccaactccagaaccatactcccatcctgcgagcacaggtcgaatctgccacgacgacttccaacgctggccaccgccagcatccgtttctcgggcaacgtcggcgtcttccactccccaaactccttcaggtatgagtaactgcgcagcaccaaaccatcaccggcggcattttctctggtgtcattagcactgcccgatcgcagcaacttgacagtgatcatagtgtatatccgacggttccgctgcaccacattcgtcagcatcggccgcttccccgcagcgttggcgtccgctacgaaacgggttgtgataccgtctttgtgaacgtttggtaactcgatgggcttcaatgtcacagacccgccatcgacctgcacggcgcagaaccagacaacgctttagtcctctgcgctggatctgtttacttgtcctccacagcctcaggctgcgccacgcacctgtcctctctcggtccaaatggagaccacacgtggtggtacgcgcggatcgctggatcgcgggatgttttgcgtctccagctcctggtaatacgcttggaactccacgcgcaggcgagaaaagcacagcgacgccaatgccatgtgcgtccgagctctctgggaggcagcgaaaagtttccgcgcgttgctacgactgcgtttctccacttgcagcagccttgataggctcgcaacgtcgaggtaggtcagcacacgtgtgagcagctcggcgcctgctggcagcgtccccgtcgcccgccacagcgtcggtacgcccgccatcatgtgcagggttcgaaaattgggataaaggttttttgggttttgggtttttcagaacacccgcccacccgttgaatcaaaatggcaatttgggatttaaaatagttgtccacccccatcagcactaaaggcacctctcagtgggctctcagtccacattgaggaaacagagcacggtcgacgtggggctcgatgcgtactgtcgaagtattcaaagtcggatgttcgactaccacattgacgaggaaaaggacgttcgcccagcaactcaccggaaagacgtccgtatcattactcaaaacgtacggggctttcgcaaaagcgacatgtgggagtggctagctgcttggagaggcatcccgatgatgcatcacccagcacttatcattttgcaagagacgcacatgcaaacggaagcggagcgagatgagttgattcaacggtggcagttgctgtggggtcaaccagagagcgcatcaccactatcatactggagcgtgggctcacacaaagagggaggcgttggcgtcctggtcttcccagactaccagcagtccgtccgtccatggaatcggcatctctggtccacgcggacactaggtgtgcagctaaatgagcttcatgtgctcaatctctacgctccgtcgtcgaagaagcagaaacgggagcagtttttttgttaatctcagtgcttggcacctctcttcggtcgacaaccctatcctggcaggagacttcaattgtgtcgaagaccccgtgacagacagacttggaggagaccgtcccgaacgaacataaagtgaagcccttactcggttgatccgctctaaaggactggaagatacgagaacactactaggatccgctcttgaagacctggagctagcaccccacgagcactttacatactggaagggcaataccgcaagccggattgatcggttctacatatcagcgtccatcagttcatggctccagtgggtagatgttaaactgcctccagtggagtcggaccatgccgaagtcacgttacacttgcgggatccggctaagcgcacaccggctagtggatgtcggtaatgagatgctccaaggtcaccgcccgctagaatcgtttatgaaagcgattattgtgccgctgcgcaagaagggagattcgccaaatgcattggactaccggcctatatctctcctgcagaccagttataatctgttcgcaaaggtcttagcgacacgacttcaaagctttctggggaaattgatcggtcatacacaacaaggctttgttcatggccgtcaaatgcaacgatcagtcgtcatgatgctgactcagttggaatcggctattttcgatacaatgatggatgaaaatgacagtgctggtatcctactgctagacttcgccaaagcgtattatacgatggatcggacctatttattggaagtactgcgtttgttcggattctccgatgacttcatcgacttgattcagcggctgcatgaaaacactactgcagaatttctcgtgaatggcacctctgcaagtagtttctggaattcgacaaagctgtccgctggcaccgttgttattcatcttagcagccgagttgttgggactagctcttgcccaagacgaactcctccaaggcaaaccattgccgggatcgataccctcgctccgtcatgaccacaagttctcagcatttgttgatgactcgactatatttctagctgagagccgccagttaccaagggcactagaaatcgtgaaggaattcggccgcatatctggcctccatgtccaaccagtgaagagcaagtacatttatctcaacaaagccattgtcaggcgagattggcatggcattccggtgtttgctcccgacgagtccgtcagatacctcggctatgaagtggggtgtggcaatatgcagaagcaaaactgggcgaagcgcattcgcagcataaaacgccgtttggcaacggccgagtccgctgcaacgacggtgagggaccgagtcgatctactgaatgttgtcgtccttccggcaatcttgttcacggcaaagtgctttcctccgtcgcctcaggttctcaagcaactcgttggaatgcaaaaacgatttctatggcaccggcaggtagtggacgattcatgccgccacaaaatttctcccgatctgatttttatgcccagagacgctggggtctgggggtgatagcactaccagtggcgattcaagcacaacgtgtgaaagatgcaatgatgtggctcataggcaaagatgatatctactcggaagcatggagaatatggagtggctttcaccggacacagacgattgatcctgcagtgtcacgcaggcgacgatctcaacgatgccgcccgagctactggtcagacagacgcaagacgtttcaaagcgatattgggggtctacttgccccctcggaagccgagcgcgacgaacggatccgcctgatcagccgggcactccccgtcttggcggcccaggcagcgtcgcaactaccccagcccacctatcaaccgaccttccgcgagctactcgaagtcaaggtacggctcgatggtattccactgctccaacccctcaacgcggaactacacgctttttggggcacgtttgcgtgggtggacaacccctggatcccagatagcaatgcgcctaccctacaacgacggaagtatgaccgaattgaagtcacatcgcttcgcagctcagagatcacccggacaggagtcgacacctatacggtccgacgtccgactgcttacgacaaagaggcgggccatactgcagcgaaactacagaggtggctgttggttatcctcctctgttctccacgcctcaacatcggagcagtgcttggagcattccccccgctgcagctacgccggtcgcctactttgagtcagacgtacacatggtcatgggttggcgatgggttaatagttgggaccggggtgacagactcgacgacgattccactacgacaacaacccaatggcatcaactggacgatcgaccaagttatgactgcagggacagatgcgaggacgctgatgaactacagtgaagggattgtcttcgtgatcaaccctctcgttcacgggttcccttggcacgttccagccctcaccaggaacaagtggatcatgcacaaactgaagcaacaactgagacggtggtttcagcggcaagaaacgactaacctgagcaagattctatcgcaatggaacgcgaagcaagccacagatacctgggtccgcggccactagagccaaacccccaaacaactttgggcgcaccgaaacatgcttacggactatcaagtgtgggtcatggatggcaacgcaacaataaaacaataatgtcaatattttgttattgattatttatggcagccggttgagctcatccataaattatttatgtctgaagggcctagaaatagctgttccttgaaaatatttctctaaatgtagaggcttcaatacaaaaagcgagttgagttcaggggttgatgccattatttatgagccagatggatcatccataaataaaaataccataatcaggagtcctgccccttgacagcagctgcgtcggggggggggggggggggcattttctatcacgcatatagcgtggtcatgcacaagagcacaagcgttttggacgaaggtgctgcaacattggctaggctgcgagatgactccacggcgcctggccaactacaagcattatctctctgcccggcaggcaccgccagtcagtaaaagaatccagtgtcgactaacagcaatgtacggacattgggatcaggagcacgaggagtctctcaggcggatatggtgggcactatgcagcattggacgtacgctgctctggcagattcgaaaccaggtagtacacgaaggagtccaattgacggcacatcggcaggttgaaagtatgtgggctacgtgtcttcgccactgcacgcagttggcgaagaaagaaagcgggcgcctagcgtcaataattcaaggactatatctaacgctcagcattgactgcttcaacgcgatgaacggcgaagccccccgcgcagctgaaaccactccacctccggcaccatggctccaccaaaaggagatggcgctaaataaaccgactgagattatacaaggaagctaatgactaacgttaaatcgactacctttcctctctctggaattttaaatagaatgagtactgaagactatttaaggggtcctaagaaacgatgacttacctcgacgcgtcttcaagacagcctacctacttcatttcctaaatggcgttcatctgcccccggaggatggtcccctttcgacatgcggcgtccctcagacgtcacattggggcccccatctgcttcgcccgccagttttccgacctggttgcagccatacgccgaggccaacgcaaccagcgtcgtcgcgaaagacgcgttgaacggcaagaagagccgtagcgtgtcgcgcagccggctgctcagcctgaacatcaggcattcacaacggggcgcaatcaactccaaccacctcttcaacagacggctcctcaagtctcagatcaggaagccgtggcgaccccggcccaggacccccagcacgtgggcgaacaaggccagcaagacaacaggtgccccatatgctgggggtccgtggttgaaccaaggaactgcgggcggtgcggcaacgtcttttgccgtacgcgcattaatgcacacatcgacttgcgcgggattcgcgcgacgtgccctatgtgccgtcacccggttttcccggcggcactgcgcgccttgcaagagcgccagcgttaccacgtaccgacgtatcgacgtgctccgcctgcagacgaagactggtggtatcccaatgactcagatgcgtcagacgacgacctgagtgattatgcggacgaatagttgaagtagcataatcacatattgacaattgattatttttcttatcaaatactttaagccaataattttagtgcattgtggttttttgcagacaaatggtatttgggcccagatcagataagaatttcagcgtaagaacttcatttgcgcagatgcatagagcgagatggatagagtgaggttggtttccagtctggctgagggtcagggtggtcaccattttagcatggggccagggtggtccctggtttggctgagggccagggtggtcaccgttatgactgagggccagggtggtccccgttttggctacacgaaaatctatgcgataaaaaatgaagtcaaactttgaagatgtaatgattctttgtattaaagcttagtaatactcgaagtcactgtcctggttactgttgttgatggtgtcctcgttgtcggtctcgactaaatcttcaagaaggttcaacatgtccacatcttcgtgctggagattcttcgtgttgaagaagatgaacaccagcttctagaggtttgtttccttcaagcgattgcgaagttgcgagtgcacaaacttgtgcgccgagaaattcctttcggcggctgcactggaacaggcagaggcgaaaaccgtcgtcgcgatgttttgcaacaacgggaagccgtgtacgtcgctccaaaactcgcttaccgtaatacgcttgtccaaaacaagctggaattggcgagtttgtttgggacttcaacagctccaccatcgtcgcatcttcgttttcggggccgttccactttgcaatgatgtccaccacgcagtcccgtgtttcttggtccataccttgtccagcgtagcgcgggtcgagcaggtacgacacaccatgtgcgtcgtcgtacacgaagtcgaaccgctggtggatcacgtccgtaatgaccccaaaatccgagatgggcatcgccagcttatccaacgtgttcggcaggtccagaaacatcctgtaggcatgggcggctgtttctctcgaaaaccttctggaagcgcgagagttcactcagcaaggcaattgccttctccaagtgggaacaaaatccttaccgcgaaccacgtcgaacgccatgcgccgcttggccttctgctccttcatcttggccttgagaaagtctcttccgctaacgaacgcatgtagaatcgcttccgactgcagcacagacacgaaacacttctcgattgttccccacgctgtgtccgctgggaggacgagtgcgatcttgccttccagcttctgcagccggcacaaatctgcccacagcatttggttcttcttgaagaatcgcaccagcttcctgcagctctcttcgagcttctggagccaaggcagactggcgacgaggtcattcacgatcagatggatgacgggagagatacagccatggaagaacgcatgcgggaaatccttctgcagcgtttgccacaccaactggtttgtgctggtgttgtcggtgaccgccgcagcaaatgtagcgaacttcaacgtctcaatcacacgcttaatatcagctgcgaggaaggtggcactgtgcgacgtggaaccggtataaacgaagcccaagaagtaggtttcatcctcgcatatcaacatgtagttgataacactcttgccgttgatgtccgtccaagcatctgtggcaagagtgcgcttctttcctgccacacgatgcaccatgaccagcttcaattcgccgtacgatccgcacagcaaggtggtcgcaagctcgcgcggggtggaaaggacagcaccagggttgaggatagccatcgcctgcaccagctttgcgtgattgaccttgttgaaggccatacccgtggaatagaaccacagcgcaaactgccgttggaaagccgtcagcttcgcagggcttagggccggaggaaagcacgctgtaattggcttcgtcactggtcgcctggagcacttgcgcttgaagtgatcgcggacgcgttcgacatgcgtctctcccagcaggtggatgatgcgctcgcacttcttacacgacacgacatcgtccgccacgactacgcgttccagacgggatccttgcgtcttccgcgcttagcagggctcgacaaaggcttcgtacttaccaggcggtgctttctgtgccccgaagatgcgacagccgaaattgcctgcgcttccatatcgcaaccgccatgatcaacttgagccagctgtatggggggcgaggtggccaaaggacgggggccacggggcggaggtgaagaggttgtggctaggtcgatggccgacgagaaactcatgtcgaggggaggggcttgggcgggagaggtgatggaagtgttctaattgaaaattgagcctacaaagccaaaggcttgcccgctccttctatccttaggacttgagacggtatagttaaggcttggagagagcgctagtatgcaaatttgcgtgagaaatggagagcgagctacggcaaaccgcggtttagagtgtttgacaggatttcataaaggaaacagtatcgaggacggtctcacctagcccggttcccggtaagcagccatgacgtcatcgggtcctaagaaaaccaaaacctaaacccacccacccacgggtcttatcaaacccacccggacaaatctgaaaacatgggttttgccgaacccagatcatgtgcttgatacgacactaaaacaatataacaacatgggggtcgcttcgggacccgtgaaaaactcgacaaagaagggttatattgagcgttatatacgtgttcataaagatatacttatgtctgtattttaacactagttatggagcacctcagtcgcgttgctcagttgagttgcttaggggggcgacactggagggtgttggagtctccacttcaggccgacgtccccaccctctaattgatccagtaactctatcaatcaccatgaccatttttttgtagtgtagtagtctccgtttaacccatgcaggtcgtcgaaccaaaaagcaattagcaacactggtcgggcgcatgatgaagtcttcatcatcaccaatcatttcgcaatattctctattctatcggcagcaagtggctgcgaggtgcatagccaaagcaaacccgcgcggggtgcccatgaagcatgtccgcgtaggaccagtgggcagtgaacgaacccgtcgttgcggcttggagctagttgcgtattaatagcgcgtggtgtgagcccccagggtataaggagggctatcctgtaggctacaggctgtagctaaacgagcttcacagagtattagacatgatgagctttgaagttgaagaaataaataggacgcgagtccggctactgacgtggcatgtacggtgtttattgtttcgttaacggctctaacggactctgagcacgtaccgcagcagcactgtgagcagtacggacccaccggcgagcaggtgaccagagactcgttacagagcgacaagaataaccggttgtgctgcgagcacctcactactgagctgaagagtactgtagctgcgagtcgaagcctagcaaagtgagcggtgccgttctcccatcgaaggtgagtattatactgtaaacgaaccagataccaaacaataacgtgagcacagtagtcatcggcaaccacataacgttcttgctggtgtggactaccatatttccagcgttctcattcatacgtagctagccttcacggcaactgacttgcgtcgaatgctgtatccggataatgctgcgatggcttcaacacattttcacgcaacatcaacatcggacataagcggagggggcgacgatacaggcaacattcacgtaatttatgatttttttcgggtattaattatggaaagtgacactgtatccccatcaactactttatgaataccacatcgaatatataaattaccagacatcaatcaatggcaaaatcagaccttcacccggatccatccttagctctgaaataaatttcagagaagagtacaacgtacgctcagacatagtgtaattactcattccctgctcttcacgcatcaccatggaaaattgcctatcactggtgtgtcgacatttggcgaagctgtcgttcattggatcccctcgaccggaacgtgaacgcgcacatagttcttctcgctcagcgtgagcgcaccggttccagggtgaatgcttgtcacgcacttgggcgagtgagactcgattcactaggaaggtcgtgttgatgtgttacttagctggtaaaattgagaatgaaatatatcaagagctaaactcatcggccgaagccgacatgccctgggggcgagctgaggttgaggttgctgttgaacttgcacttgtcgtcggcaaagcgtcaatcctatcattgatccccgatgttgctgaggtgtaggtgatgcttgcattacaatgctgcactatcatcacaccacagccatgatgttttcgtacgaaaaagaagttgattcactattttttgacatgccgtgttgctagctatggtaaactgtagtaatatctacttcggcaacttggattttgatgtggaattcaaattcgactacttttttttaggcaaactcactggtttgggtcccgaagcgaggacacctccgtccttccacgcagcacctaagctgctgctagacgttcggccacatttagtatgcacaatgtgccggggcccttcttaatcctcgtgacgctgcgccttgagcagcttcttcttcatggcgtggaagcgcagcagcatcctaaaacaaatccgcgccaacacaaatatccatcagattttctctgctaaaacccattttcctccttcggagccctcaacgcaccagtagatcgtgaaggtgagagcgctgatccaccagttgcgctcggatcgccaccgcgaggcttttttctaggtgttccagagaaacatacagtttaagagcattaatcagatttacccttgattttgttcaggttcccaaatccaggttcacggacctgcaggtcggccgagtagtgcgcctcgatgtgctggtcgtgcggcagcgagtagcgcttctgcaggtcgatggtctgcgccaccagcacgacgaaggacacggccgtgatcacggagaagacgctgagcgtgccgacgcggatgttgaacaccacgtcgccgaagttgacgatgccgcggttcaacatgacgcccgggaacgggatcgtcatcaagagcagcctacatacagttagagagcaaactcaaaagttagacgagcggaatcttggcgaaaacgcagcgcgagttgcacgtacagaaccaccgcaggcggcagcaggacgtaggtgaaggacgaccacatggacgccatggtgcttgcaggaagggggagtacagtagacactagaggagcttccagcttcctcctctttggcttgttgggaaatgtgagcggattttattgggcgacgactctgactcagtatgcgaatagagagaggatagtatgcaagatgagaggctacaatcattcgtgagaggtagcaatggattttcacttcaacttgcctgcaacttgaccaccagaggctgagaacgatctcctggctgcagagcccaatgctacgtggttgagagcagctctcgcattgactacatgctggcgggatgttttgttgttgatgtcgttgctgtttgtttgttgttgatgtgtgggacggggctcgcttgtgactcaaatcccgttggagttttagtcttggagtcgaaagtcgaaagcgttggtcgcgatggatcttggtggcgtggatactgcgcgtggggctcagcgcctggagcggctgtcttacattcgctctgctgaagaaggagagagggacaaggagtcgacggtgagcgtcactccgacggggaaagctccggatgaggaggaggacggactgcaagcgggcatgccgctccgctccggcgacgtgccgaacctgtaccattggcggtacattggtctgctcgtgcagtacgcagtcgtgggcgtgttgtacggaggcctgccacgcaccgtgtaccccttcttgaacaactacctgcatctgaacggctaccaaacgctgtcggcgcgtgtgctgctctcgctgccttggtcgttcaaagtgatgattgggattgcctccgactgcttccccatctgtcgctcccgccgccgagcgtacatggttctggggtggttggtctgctcggccatgctgctcattctcgtgttcgtgaaccaggagtctccgttttacatggacccaacgctacggggcaaggatctctcgaatataccccgcagcgatctcgatggtcgcgtgaattgggacgcaccgagctcgggctctttgtacgtcgtgctgatgatgctatcgagcttgggctacatgatcgctgacgtcgcgtccgacggacttgtggtggagtttgctcagcgtgaaccggaaagcattcgcggtaacatccagtccacagtctacttggtccgcagtattgccatgatcctgtcggcgcttctggttgggtttggactaaacggtgaagactacggcgggtcgttctcgtggtcgttctccatgagtcagctgatgctgatcttctcactgctgagtctcgtggcgatcccagcggcgttgtggctgattcaagaacccccgatcggtggcgacgcacctcagtttggcgcgtacatgagtgcactgtggatgctcgtccagaactccgccatggtgcaggtgcttgcgtatcggttcttcagcggcatcttcgatggcttcacggtcacggcaagcgacccgatccagcgctactgggctcgcgtgcaccctctcaacgaaagtttgttctccgtggttgggctggtcgtcttcagcgtggcgctgtacatgacgaagcgcattgggctgggctggaactggcgccgcgtggtcgcctggacgactgtctctgtgatcgcgctggatgccaccgtggggatgttgaccatttgggatgttgtgcgcagtcagtggttctggcttggcacgcccatactcgaggagctcccgcaggccatgggtttcctcgtatcgacgtttgtcgtggtggagctggccgagctcggcaacgaggcggctgtgtacggtctcctgacgaccgtgagcaacctgtcgagtccctttgcctcgtgcatctccaagaacgtcaacgcgctcttcgacgtgggcgtggctgacatcatccgcgattcgacgcatgtgcgctggcaagtcacgtggaccttcgtgatcgcgtacatcatgaagctgctgtctctcgcgtggctgcctctccttccgcgccagaagcgcgagacccaagagctcaagcgccaggctcgctcgtggttctggggcggcgtcgccacggtcgccatcttcagcttcgctctgctctggtccgtcaccacgaacctgctctccgtcttccctggcaccgcctgcctcgtgctcgccggcggcgctggttgcaagcctcgcccaaagtcaacttgaccatggcaaacacttctatggatgcctgttcgtcacgcgtacactgatttgctagcgttgcggtagtccaaaaatcccagttttcagccaatcgtctacctgactgatcctccatcacaaatcgagcaccaagcaagagtgagaaatgctgcgcttcctgtccgcccccgtcgcccgcgccgcgcagaagtccacgctgcagcagcgttcgcgtgccctgcagatcgtagcgcgtcgtccggcggcgcccacgcgcagcttcacgtccacgcgctcgcgcctgaacgctgagaaggtggcgcatcaagtgcattcatgattttcaaggctataattgaggtctaacgtggtatttggtggcgttattgcaatatgttgctgctggtggtgactgcagccgggcccgcaggcgactccggagggacagaaggccccggacgcgctggtgctcacgccctatgagaaggtgacggccaccgccactggcggcttctggctcggcctcatcggtctgggcgctgtcggcgtgtacttcgtggcccgtgaactgctgcccaagtacgtggacatttgttgaagttgtggggggattttggagaggtgctgacagatgattccggtggtgtgcacagccgtatgagccccaacggcctcttcagcgagtcgctggacttcctgtcggagaacacggacgtacgttgacgcaaaggatgaagcagtgtcgctttctacggactgacgttattaattggttgctacaggtgacgtcgcgtctgggcctgccgatccacggctacggccacgaccacggtggccaccgcgaaggccgccgtaaccgcatcgagcatgtgaacctcaaggccaaggacggcaccccgcgtcttcgcatcaagtacaacatcaagggccccacgggccacgcctacgtgtttgctgaggtgaaccaggacatgaagaagaacgagtacgtgtacctcatcgtgcaggtaaccaagaccggcgagctgctcaagatcgtcgacaaccgacagatcctttcggctgagtccaaggaggaacaggatgctctgcgccagctgctcggcaagtaggcaacccgctcacgtggcatgagaggaacccgagctgcttcagaacgtgaagcaggacttaaacgaaggaaccctactctttccattggggtggggtatctggtagcctgtgcacgagttgttctgtcttgtatcgccctctgcgtcgagccggtgggtgggtgatgtctacttattggagcctgctattgcgtgctggtaataacaatttctaaagtagctaacagagcgtacatgctactcatcataaaggaaggcgttctgtgcttgatctttgcgggacatgtcgttccgcttgtggactgccttggccttgaggtcagcgcgacgcttaacagtggaaaccaaaccgatcttcgcgttggcattctctgtcacttcaaacacatcgcgcagcacctcgttctccacgaggtgcgtctgaaatccagactgcaatgcacggcggaagacgtgcgcctggaagaagcggctccaagtagacaccgtgagcgtctcgccgtccgcctgtagctccttgatgggtccttcgcctgtctgcagcgtctccagcacctccttcaacatcgacctctgtgccttgcggttcttcttaccaatactcttcccagactcgcgcatgtacgcctcgatgcgtgagtcgagaccgccgatgggactcccagtgggctcatgcgagtacgtccaatccgcagctgcggacttgtacttaaactgcaccagcagcgccagcacttcacacgctgaggctcgcaccgtcgcattcgttccgcttcgaacaaacgcagccagcgccgctacatgaccatggacgatggactgtgcgttgtataccttgctgatcatgaccgacgggtggaaaaagctgaccaggaaggcccagcactccatcactgcgatcgtcagagcctccgggaactccttttcgtcgtggccatcatcctcagcgtccttggccgcgacgaggaagcttccgaacacctccagtagctcccacttgggctcgtcgtccggacagcagacgaagcacgcgatgctgagcgcatacacggcctccacacgtagagcgctgtctcccctgtccgtgaagatcctccgcagaggcgacaggatgtcgtcgaagaactcctgctcgtcggccccgagcgtgatggccaccatgctcagcacacgcagcgccaggctgccggactccttagctctcttcttgaggcagccgagtgtgtgcgacgtcagcgtcaccttggccgactgcgccctgtcgctcatgacctcagcgcgcagcatgtctaggatcttctccagcgccgcgaccttggtgctgtccctcttctccgtgagctgctccatggcgccctccaggtcgtcgtcctctgcatcctcctgctcgtcctcgtccttccacttctcgccgcggcccttgcgtccgcctccgcctcctcctcctcctgattgttgctgctgctgttgcagctgctcccactgcagcgcgccctcgagctccgactcgatggacgagtcgtcgcagttggagatgatgctgtagtcgatggagccgtcctcgccctcgctgccggccgccagcgcattgcgcagcagcctcttgccctcctccgacaggcggcggcgctggtgcgggtgcagctgcttggcgcgcgagcccttcgccgcgcgcgtcatggtgtggtgttgtctccgctaaggtagcacggactgcgcagcagcaacgccgagccgtttcttcagattctgcttgaagcagcgcgccttacaaacttcaagtcgggaccaaagtcgatgtggcgcacatggaaaacggataagaggtgtgacgcacatgaaaaactatcgatagccgcgcagcgattggccaaaaagcgcccgccactttgcgcgccaacaacactgtcaagcttgctgtaggatactggagctgcgatggcggacgacttcgaggcaccgtgggtggagaagtaccggccgcgcgtgctggcggacgtggtgggcaaccgcgacacggtggcgagtctgcaggccatggcgcaggcgggcaacatgacgaacctgatcctgtcgggcccgccgggcacgggcaagaccacgagcatcctgtgtctggcgcgcgagctgctgggcgcgagcatgaagcaggcggtgctggagctcaacgcgtcggacgaccgcggcatcgacacggtgcgcagcaagatcaagatgttcgcgcagcagaaggtgacgctgcccccgggccgccacaagatcgtgatcctggacgaggccgactcgatgacggccgcggcccagcaggcgctgcgccgcaccatggagatcttctcggccacgacgcggttcgcgctggcctgcaacaactcgaccaagatcatcgagcccatccagagccgctgcgccatcctgcgctacacgcggctgcccgacgagatgctgctgcgtcggctgctcacggtctgccaggaggagaaggtcggctacaaggaagaaggactggccgcactcatcttcacggccgagggggacatgcgcaacgcgctcaacaacctgcaggccaccgccagcggcttcggtttcgtgagcgacgagaacgtgttcaaggtgtgcgaccagccgcacccggcggtggtgcgagagatcctcaaccagtgcgccaagggcgagctggacggcgcggagaagcaggcggtggagctctggaagagcggctactcgtcgctggacatcatcggcaccattttcagggtgtgcaaggccctgcccatggaggacgagaagctcaagctcgagttcatcaagctcatcggcgccacgcacatgtgcatcgcggacggcgtgtcgacgctgctgcagatccacggacttgtggccagactgtgctcggctgcattggcggccaagactgggtgatgttcggaagggtaagaacaacgtaacaaagagatatcgcaaagggggttgagagaacttatcaaaggtggtgcttggagatgcctaacagacaggtgcctcgcgtgagcttggtcttggggccgctgctgggcttgaaggtcttgcgttcgcgcaacgcgtcgggtaagtctttggtcgccagcttgacggggttgcggcggttgggcagcatggcacggttcaccatggcttcgtcgtagggttcaggcagtctctctgggaacttctcgaagacgccttcttcgccatctttgatagggttgttgggcttccacggcttataggttggggcgcgcgcggcagctcgttccttggggttcatgagctcttgtgcacctgggggtttggccagacactggtcgtcccagcccatgacgcgcgaggccgcgacgtgctcgtgactgtcgaagtagtcgactccttctgtggtggacttgaagggcttgcggtctccgatcgctgccttgtgcttcgcttccagggcctgcgccgcccgccgttcggatccatagtcggcccccatagcagcaaggttccctccgatcagcgttcctgcgtacccgaaggtgccgcgacgtccagggttcgtcagcacgttcttcttctcgaactgtttgtctttcgggttgggcctcggagccgcattttcctccttcgccttcttgatgtcgtcctcttcgcgctcgaacttgccgaatgcgccgtagtagtcgcctgaccccgtgtggttctgtgtggggttcgagtacgtgaatccgttgggcttgacaaacttcttcgtgttctcgagtcgacggcgggcctcgaatttgtactgctccgcgtattcgccgccgagggggtcatacttcgggaagccggggccgaatgttgctgcgagctggcccttcttgggtggacacgtgaggaacggcttcaagtcaccaccgaggccccgctccttgggcttcttctggatgtacgggtcacccaccgacacgaagctcgggtcgctgaagccaccatcccgagaagctttcggctccgttgccatagctggttgacgagacttccactggagaagagctcaaggcaagtggaagaaggagagggactattttcaagtgccagtagagttgatcgacaagacaagaatgggtgatggttaaaatagcggcgatcacaggcgggcacagctctttctggtgctagcagtagcaactacggggtcgtaacactgatgcccgtgtacttggactggaagccgttcttcacgatcgtgtcgtggtaccaggaggccgaatccttgggcgtgcgctccagggtgtcgtagtccacccagacgagtccgaagcggatgttgaagcccccggcccactcgtagttgtcgaagagcgaccaggtgaagtatcctcggacgtcggccccctccgcaatggcttcgtgcactccgctgaggtactgctcgaagaagtcgatgcgcttgacatccttgacaccttcgtccttggactggtccggccacgacgaaccgttttccgtgatgatgatgccgttcttgggctggtacgtcttgctgatgtgcttgcagagctccttgagtccccagggggtgacgaagttccacattgccgcggtttgttcccacgaagggtcctcaaaggcggtcacaccctcgtcctggaagaacgaccccgtactgtcgctcgggggcagttcattgggtttgtacgagtccgaaggcttggcgaacgacgagctgtagttgttgagcccgaagaagtccgagctgcctttcagaagcttcttctggtcggccgtgaacttgggcaggcggtctcccagtcggtccttcatgatctgcgggtagtcgcctttgtacaccgggtccgcgaaccagccgaggtggaaggcgatcgagcgctcggccgccttgatgttctccttcatctccgcggggtcctcggtgggtcccggtacgcgccagtctgcgctgagcgtgattccgatctgcccgccctgcagctcctggaactccttgcggtagacatccacggctcgggagtgagcaatgagcaggttgtggccgcatctgtacggctcgatgtgggcgttgtgtttgcgtcctggggcgtgcacccccagcgcgagacccatgacgctgtgcacccacggctcattgagcgtgatccagttcttcacgcggtctccgaagcgctggaagcacacgcgcgcgtaggccacaaacgcatcatggatctgcgaccctgcgcccagccagccgtcgaactccgtctgcagggccaggggcaggtcccaatggtacagcgtcacgaacggcgtgatcccgttggccagcagctcgtcaatcagtcggttgtagaaggccacgccctcctcgttcacctcccccactccggcggggatgatccgcgaccaggagagcgagaaccggtacgctttcagcccgatctgcttcatgagcgccacgtcctccttgtagcggtggaagtggtcgatcgccacatcacccgtgtggccctggtacgtcttgcccggcgtgtgcgcgaacgcgtcccagatgctcgcaccgcgtccgccctcttgagctccgccctcgatctggtacgcggcggtagcggcgccccacaggaaaccatgagggaattggcggtcttggagcatcgtggaggtctctttgacgggggaactggagggtggcttgacgttgaagcggcaaattcggaagtgagcaaatccgaggctgatgacacgtacgtgaggcaattgcaactactgtttgtgacagcgagtgcgcctaaaagcataagcacggctgagctcatcattcccggacctccatggtcatggaccatgactcatggttgatgcagacaaacatgataagcaaaaacagttgtatttcgctagcggtctcagcgtaaacttcaagctttcaaccgtgccttggcctggcctgactcagggcagggtggtcgaacgtagttattgcaatctgcttgcgccgacaggggctcaagattgcgaagcaataacacctgaacggttcaagcaagttcaaacatgcagcgtgtagtcccagcgtacagtaggaggtgcaaaataactttcccccctctgtttttgaaaagaaaagcttgttggtctctcgtgacttttgtaacgttgcgaatggagatctccgctcaagtcttctgcccgagacgttcgccggaaatcgtacactacttagtaagtgcatggttaacggccagggtacgagaaaagcagtttctagcatagggaacctcagtccgtagtgcaccgacgaagtgccatattttgtagcggcgatttcacaggacgactctggcagctctcctcgcatctgtcaccacgtatatccatgtactcatggattacctttttgtcgggtcctctgcgggtcgggtctatgcggcaaatctaggttaattataaataacttgcacttcttagaccccgatcctagacccagaccataataaatcgacaaacgcccggggagataacctacactttacagaacctatcctaaattgggctacctggactggtggtcggaggggggggggggtcgcagttcttaggagcgatttaatacatgcagatatatatgaattccgacaacaaaatatcatttagtacgtatccgcaagcatcttctgcgcctgcttcgcagccgcagcatctgccctggtagtgtgcctcaaagtataagtaacggtaaaacacttcccagggctgtggaaatatagattgtttattgattggcaactcagactgaaacaatcaattattgcaatcttgacaatcccaaaaacaaaagattgcaatctaagttctcgcttgaatttcctctgctaggttcatatttttactcgtttggcggcgctatcgccctaagatctttgcttattcgattgcatacgtgttaaccttcaaaagccttggcaaaaagcaatgttgggtcttgtattcatcatgttgagcgtgtaccccgttcgggcacctaatgacccctcatttccgcatttcgaagtagcagaagacacagaaaggctttgatgagtctaggatcggttccatgtgcttggtgttgcatattgctctaccggatcactggcaaaggctcaaaatcagtaaagggacaatatgggaacgggattgtcgattgagatcacggagcaatcaattattgtgattgacaatcttgacaatattacaatcgcaatcatattttccacagtcctgctatcgacgacgaggaaaggggggcgcgtctacgtgtaactttcgacaaggcccatgttaagcagatgctgaaaaacgaaaagttcatgaagcgtacgttcggttcgccgtcaacgaattcgcagttcgaattcgaagaactgtcgttaggtggcccaggcgagtttatcatcgaacgactttcacacgacgttcgtgcaacacaggtacagcactggcagtgttcgcacaaacactaactgtatagctaacagtagtgtttgcaaattgtttgttagtgtgttgtgaatctggcttacatgtttgtggagttagacactttttaactatttatctgaactaaaaaaagttgaagctcttttcacttgtcggaagctggtttgtacgcgaaggtcttcgtctttacaccaaccatgatttcttcaaactaagcagcactatccggtagattactcttgctaccccgtggtgcgtacatggattgtgggctcgacaacgggtgctacttaattgtgagtacgcttcactgacttctgagtaattccacataatgtgacttaggaagatgccacgtccggcattcgccaccttcgaggaggatacaatgtgagtgcatatgggaagtaacgcatcgatccacttatgcgggcgtgagtaagctaatagagaattcaagcgtcatctagcagaaaacaaaagataagttgccctaaagggtttgtagcacatttgtgttcgtgaatgtcatcccaacaagcaacgtctttagagtttagtcaatagtttcaaggtgacgcagcgcacggatttaaatgagcttacgtactcggaagtccgagcacattactcattacttggaagtccgcgaaatgtactcaaaagtaaggatggcccatcgacaacgggtaacagtagccattaatttgatctgctagtgatagagcagcaaacatacaaacgcgtttgtaaacatcactaacagtaagcacgtgtgttgtgaaaatcactaacatgtttgcggagtacactaagcactgcactaccgtagctgtcgcaactatccgagacaattgaagcggtgaagaaacccgcccattgctgaggagttgaattgctgcaaactgctgatcaaggggacttttaagtaggagcgtcacaggtcgcgagaagggtagtcgcagctactacgaggacgtaactcagacgccttgttgacttgtagagcctagggggctgtgtcacagaggtccgaaaatacagtactatattgaattgagtacgagatcagaccctaataaaaattacaattcagcaaggagaaataataaaaattgccgcaatataaatatactgctcttcaatttgaggcatttctacagaagaaataaaccactttatgtgcgtcatatgattacagtctgtaatttacagagtcgtttagaaacactttttggggtgttgctttagaaaactttgcatggtggatgcttaaacaacctaccggtagtaatacatgagcagatatatctggatcttgctatatatcgtaaatctggtgtagtggattccagggtatcaccttggtatcaccgcagttaagggctcgatagcatgtcgcggcggtgacccacgcgagccacaggtaatgggttcaccgcatcatgaccagtcaagcttcacacagacacacttcatagtgtgtgcacctggtatgaggttagagactaagcattttgtatgaccaactgcttcgcggacccacttcgctttttctcctacaattgcctcaaaggcgtaatcactatatcaaaacattaagctcaagtccatagtggattgccatccgctgccgtcccctgatgtgatgtgttcggcgggattcactacatctggacgtcattgatagtctgacttgcgtacacgttggattctaaagatgttgattgcccattatggcttttacaactccttaatcgttgcgtatgtagacctaactatcattttatgacgtactttgctatgtttggcgccgtgcaaccttttttcatattaattgtcaataatgggtacaatactgtattgtattggaatcgttgatctccaataataaaaaatagtattgtaaaacccaattatttattgaatcgcaattattatttcggacctctgggctgtgagtgctagcgagtaagttgcgaagtgatggccggtctggtctactggaagaggagtcggacagcactggtggtggtggtcagctgagagagccatttctcgtgcgagcaacttttctgatggtaccgtagctattggggcatggcatggaatggacgttcggatcacatttttgagatgttgcaacgattgtcgtcgggtttgtacgcgtattactctatgtatacacaccacgtgtagtgtctacaagcccccagtacgaaatgatggcaagtcaataatgttggtggtggcaagttgccactggcaacggaaggcttgcaattaccgtaagccagggctaatacaacgggtttaattggggctcaacgcgccgtttcgccgggtataagaagaccaggcaatgactcaactccctgttgaggctctctacctcgcttggtaccgatttagttcgagcagcgaatggccaatatgcgagcaagaatgcaaccgtgagaaccactattacatgtacgggcattctcaataaggtggattccgattggaatgcgtccacgctcccagtgtatttattgttttcccctattgccaccgttggtttcgcttgtgtctttgaaggacttcggttctagcgagcatttcccttactcgcagtttcacctgcactacttgcgcaacatcccggtaacaaaacttgcatatccccagattttactctaacgttagacgaagcttttcatgtttcgcttttatcgcgcgcgtctgatgcaacactgcgagttcctttgtgatggtcttacatgtactaacagtgtactaagtaagtacagatattaacatgtcatgttcgcattacgctcttgacttccttagggatttgtcctcactcgataaaaattggacgacttatttttcttccgtgcgctgagccgaccgtcgatccaacattgaactgagtgcttgccacgagcgcagacggttgaatctcttcaagagaaagtatgggttgatctgtgtatgccaaatatatttgagctttcagtggtcgagaaccttctcgatgaaatacatgttaacgccgtggcgcggaaacccttcagggccttgcaagtcctcgtttgccagccgctgcacggtcttctcctccccatccaatatccgcttcttctcgaagaaggcgtaggctttccggtacacctcattcgccgcgccagctccacggttcagactcatgaacctccgcatactgttggaattgacgttgcccaatgcgcgcaggaaagccgctttggtcaccatcccttcaaccaggaactcgtcaatcttcctgcggatctcgtcgcagtcgtcgtacacaggtacgcagccctcttcgtccacgtctggcagctccacgtcctcaaccctccggagcagttccttgccgtctctggccttcttggccttttcttctctctcccctgcagtcttgcgcttcttctccttcggtttcaccttcagtctctgcttcgcttgattcacctcagcagctgtgcgtttcgtctccttgggcttcatcgcctcctctttcttctcctgttgctctcgtctgtagaagaagatggctgcacctttgtacgtaggattgctacccccctcgtccggcccctttagagccatgaacctccgatacaagcttgcatccacgtcgatgaccttgaggaacgccgcttgcgtcatcttcctcgagcctagaaaagcgcggatcttgaggcggacgtcccggcaactccattggcgccactcggggtccacagcgtcgaactcgttttcaatgtgttcttgggggaactgcagcggctccggcggccggttggcgagtgcgttggcgatggacgcggcattaaaggagacaggcttggacgcggagaaggagaacgtcggcggagcgtaactcggcgccaataagccgctgggcgtcggcattgcagtgacaaagccaccgaacggtgggttgttagctggtgctgtgggtggcgtttcgacggcggtcggcgcctccaccggggtgctgttgagcagcttcgacatgtccatcctttggcgcgaatgaatttgaagcgtgattttcgcgggcttgtttgatttgatacttcaggcaataaaatctgaaacatacagatttggttctcagtttagaaatagtacaaaactatagattctgtcgtgttccaaaattggtactgtatagtgtttcaatacagaaataatctctgacactagaagatcctcttcaaccttacatgattactgaaaaaccctaacaaatttactagagcttgtttcttaaaagcttttgaaaatgattctcttaaaaagagattcatgggtttacagtaagattaagcttatctgaaatctcttggtacatttttactacaccttttcaacttcaaaactgcaaattccaagttcaattctgcaaaaggtaagttcaaaaccgcacgagcagagaccaagctagtctcgtacttttatacacagctcattggttggtacccagtatatctagtcaatataggcaaattacactctaaaatcacgtctgatgatatttatcatacagtttataatatgtgtttatagagtattgttgttttgatcttacattttgctgtattttgaacttacaatttgcagttttgaagttgaaaaggtgtagaggtttaagagaatcatggctacatttgctgatagtgtgccgtgagcgaaattgaaggatcacggtgccgtgctctgagagagtcgcaccgttctgaatcgccaccgcgcatcatacccaagctgtagaacgaaagcaggaactaccgtaaagcaccactttccagcattctggacagccaccctaatgtaacacgaatacacggaatttatccattggggaaatcgtggcctctccctgatcgatctgctgtaccgtaaatgacggttatcgtggctctggtcagtttgagctcagtgccaactcaacaactttccgagaggtgccacgctcatgcatgcctctgaagtgcccctggagtaaacaaccaacgcatcaacacgaaagctgcggagcccatctgaaacgtgatcatttccagagaacacggaacgtggcattcgtcgccacgatttcaagcaagcctgaacaaagctcattttgccttttacgctctcactcgcaattcggctatgcgttttctatcgctatgggctgtgatggcacttcttcggtctacggggcctcgtctaccacgatctcggacaaaaccagcgtcacacaggtcaacacggacattgacattgaagcctggcctcgcaatcttgaatctgaccatgctcacccaaccaagaggctccttcgccgacaatgatgaagagaggggtatcgagaaggtggcagacaaagtcgacgacactctcgcgatcgttgttcacaagcctccaaagtttccaaacggtttgagcatcgaaaaactcacgaatggcgtcgcagctaaggtagaagctgctgtgcaaaagtacccgaggggcttgagcaccgcaacggtgaagcagctgaagagcagaggctgaaagatgtcgcggtgttcgccaaaatgaccaagaagaccaaggatggcatgcacagggacattgaaccattccctgcgccaatattgacgtcgcatacggggcgtgaggatcaactctacgccaaggacggcactcgtttgctgtcgtgcagcgtggtgtcgcgatctgccaaggaaggcggcgggaacgtgctcttgatttccagctcgaatcctacgaagaaggactggctgctgcctaaggggggctgggacgaaggcgagaccattcacagggcagcgtggcgcgaggtcatcgaagaaggaggagtaagttgagcatttcgactgacaatgtggtgatcatttttgtcatctgctcaatactaaccagtgggtttacaggttgacgcacagctcaaaattggtctgggaaaactgagctttaagaatgacaagggcaagaaactccaaattggagtttggagtctccaatactacggggtgcggatttagttcgagtaacgaatggtcgatatgcaagtaagaatgtgaaatgatggaagtccaagtaacatttttcatatcggatatcaagacaaattaataagcccatgtgggtggatcctggagaaacgtctggcgtaataatgtgtcacgacgggcttatggttttgtccatccgtgatccagacaaaaagatacgttattgagggatgagaggctcatactaggagcgatcgagcaagcgccacggtataaggacgtatatcaacaccagtatgtagcgctatatcaatgatggtaccatccgatcaatgtccatccggtgtcaccaacaatttattcagcgccaccaatctatcacgctaaaactatgctcctcctactaaccttgttagctaaataaaagcttgcacgccagctacgacgcagtgctccctgcgttcgtgccaaaataatttcgtagccacttggtatgccacgcttcagaagttggtggtgtagatacatgaagttggtggtgtagatacatttacatgtatccgacatctacgcagtgttattatttatttgtattattcgaggcgattatagtgtaggacagtgcaccatggttctccgataaaaaagacaacagcttttgactcgtgtctttagacatatattgccattgatataaaatatatacaagtagtgtataatactactgcattgagatcggagttgtacggcattctcaataaggtgctttccgtggaattcatcctcactcgcacagtattcattgtttgtcccaattgctaccactggtattgcttgtgccctagaaaggcttcgattctaacaagtatttctcttactcgtagtttcacctgcactacttgcccaacatccttgtaactgcatcttactcgatctgccgccatatttgcatcttacttgcatatcccccgaacattactctaaataaagattatcccaatactacgcgtacaagatgaaggctaacacggtgcatgatcaaaaatggtcggagagcatgcgttatcgcatatgggtaggttggtagctgaaggggagaaagtctgtatcattgctgaggaagtgaccaaatgttgctcggtactcgatcaggtttcgtacgacgacgcggttgagatgctgaagttagggggtcgcacggaaatgatcaccatcgtacgccgcgcgcagttggtggataaattggcgaagaacggcaaattgccgaaggaagatgctgaacttgcaagactcaagttcgaaccgtaagtgatgaaccgaacggaagtggggggggggtaaccagcacgcgtttttttttcttttcaccacaaaacaacttgttttcaaagtaagtagtactaggtgaggtctatgactactacacactctaatgcctataatggccgtgtctttctggtggtggctccactgcggcgtttagatggcgagttctggtggaagtgagattaaccatcactctttgaagcactgtgcttcatgctagagacgacagtgcttggcatactagttatcattgctggcaaaagcttggcaatataaaaaagtttgttgttgctgaaactttgatttggggtgtagtcaattggccatgatatgattggcttctgctagttttgctcaagcgctggaaaataaaaaatcttcttgttgctgcgtaattgactaccactaatagggaaatggtgttttgaaagtcacggaaatacacgcatcaacacaactacgctattttaatagagtttaccaattcgcaattcagcatgagcaagttttttcgaacccattaaatattaatgaagctaacgtttgtgcaatatcactacgacgcgctgcatggacttgacttcccgctgccctctttctccagttctttcttgcgactttcaatatacctatcgatgcagtactcgctgacgccgaagcgcgggaaaccttcagggccttgcatgtactcgtttttcaggcgctctgccgttttctcctcgccatccaaaatacgcttcttctcgaagaaagcgaaggctttgcggtacgcctcattcgctgcaccggcccctgctcctctcagactcatgaatctccgcaaactgttggagttcacattgcccaatgcgcgtagaaaagttgctttggtcaccagcccctcgcccaaaaagacatttatcttgcggcggacctcgtcgcagtcatcgtacacaggcacgcagccattctcgttcaggttcggcagcttaaccgcttcaattctcctgagcagctccttgccgtccctcgtcttcttcgtcttctcttctttctcctctctggttggggccttcctcttcttcgcattcaccgcccttttctttcgcgtcactgactcttccctctcgtctgaacgtgaagtgtgttgcgttcttttcattgcctcctctttcttctcctgttgttctcgtctggagaagaagatggctgcacctttgtacgtaggattgctatccccctcgtccggtcccttcagagccatgaacctccgatacaaacttgcatccacgtcgataaccttgaggaacgccgcttgcgtcatctggctcgagcccaggaagctgcggatcttgaggcggacgtcccggcaactccattggcgccactcggggttcacagcgtcgaactcgttctcgatgtgctcttgggggaactgcagcggctccggcggccggttggcgagtgcgttggcggtgggcgtaacaccgaagtaggggagcatcgaaggcggcggagttgcggggtcgatggccgcggtagtaggcgcctccgcgggcgcatcgttgagcagctccgccaggttcattctttggcgcgcttttcaaatgcgaatcaatcagtgggaggcgttgatgtggcccacatcacgtactagacctctcgggtcgcatatagcaccctccgaaaccgcatttgcgcatcttggccagaggcaactgatcgacgtcatggggagcgcgctgcagaacgtgctgcggccgggcagccgcgagttcgtggtcgtgctgaacgtggtgctggcgctgctgttcttcgtgatgctggcggtcgtgtacacggagctggaggactcgtaccacgtgttcgtgctgctgttcctcgtcgtggggctcgcgggctccatcaactggttcatcatcgaggccaacaacctcaagcacacgcaggtcggcgacggcaacggcaacggcaacggcaacggcaacagcaagcaacaggccgactccaatacaagacccaagacggactaagcttaatactacaacctcgcctccgaggcggaagtaagataccaattcaactttctgttgttgttttcattgactcatacacgcccccactagggagggctacagcacataatatcccttaaactcctccatcttcacacgtcgtcgtccgtcgccagcccgcagacgcgtttgcagcagctgagcgcgatgctgcggccgtagggcacgtaggacagcgtgtaccagacgagcgccaggaactgcacgatcaccgagagcagcacgagcagcatccggtggtggatgtgcggcgagaagcagagcagcagcgtcacgaagatgaagacgacgtacacgagcgccgagtagcgccgcttggagtggaacatggtctgcacctgcttccagggccccacgaagaaggtggtgcagccgatggacaggacgttgccgatggtgtacgcgatggcgaagggcgccgggttgccgtgcaccagcttggccaggcggaaggtcgagcccagcgacagcacgaagcccagcatgaagcatgtgacgcagccgatgacgcgctcctggtacgacagactcgggcacagccagaagctgttgctactgctgctgttggagccgggcgagccgtccgctggctggccgctctccgggtccagcagcttctgcttctgcgcgcgcagtgcgtccatcatggtgcttggcttgggttgaagagctccgatggtgatgtccacggatagatccgccccttcaggacagcgtactttagcttaagttcgaacggataacctgggttactcgggtagtccgtcgaacttagacgggatcttgcccgcggccatacaaaaaggacaagcggcaaaagcttttagcactagcctaaccggttgccatgcgtccgctgctgcaggaggcgcagttcgcgtgcttcgaggacgacgagggggtgacgagctcggatgtgacgtccctgccgagcttcgtggtgtctagcccggcggttcgctctcagccgcccaagagtttcgcgcgaggttagcactacctaaccagttggatgttgttgcccgttatgatagtgctaaccacggattcttgtttatcacttaaaattccagtgcgcgcgttggagtgcagcgggtctggcagcttctacttccagaacgagagtttacgtgatcgcttcgtgtgctggcgcgtgctcaagaacgtggtggtgttgcgcgagtggagtttaaacactacgttgcggcaaaacggcgtgcggttagagttccccgcccccgtggttaacactggcgtgttcgccgtggagagctgggaggatgacgccgtcactatcaacgtggtgactcacgcgggcaccatccaccgcttcacttacgccgtccccagtgacaacaacctcagtatcttctcccaggctgatgcaaaagctttccccgagccgaaaccggcaactcgcacgcgttgcgacgtgttgcaagtgttaaacagcgacgagattttaagtgttgcgctgtgggtgaacgagtacaacctcgtgttaggtacggactcgggccgggtgcttggtgtgaacttcggactgcccagtgacgccaagaagatgcaggagtttgtgtttagcgacgagtcggtcgtgagctggctgtggaacggactgattaaaaccacggcggcaaagtttaagggtgttgccgaggacggcgagaggagggacgtgggggcggcaattgttgccataacgtgtttccaaattgacgcggaggacgaaaacgaagagagtggaaatggcgagaaggatgtttgcgtcatcacggtctccgccgactgcgtgttgcgcgcctggagcttcggctcgcagtcgtgtctgggacggcaacagttgcggtctctggttacgccacagcttaaagacgaggaggacagtgacgaggctaggtgggaaaacgaggacttggacggagacgatggtgttaataccttgggagtgtacgccacccacgccaaggttgttgcattatcgcctacggaatcggataattgccggctactggtgcattttgacacaacggcggcccactccacggagattttcctgcttagaggagacgtgcaccctgttgcggcttcgagtgccggagcgggaggcgaggaacttgcgctggatacggccagggtgttcaccgtgcagtccgtcgagcaaaaatccaagaggggattgaagatggtggattttgccgtggataaaaacttcctcttctcgtcgtggcggtcgctggacggagacgaagtgtacatccacccgaacccgatggctctcaccggtcccaagcggatccagggccagccggtgagcagtctggacgtgcagatgcaaaagtacgaggaggaagacagcgagtggctcttcgacctgaaggaggagggcgtgatgaccttgatcgacgactttttcgccgagcggatcttgttgccgggtagattttcgcggcagaatctgtccaatgctatcgaggaagcgcagaacggagcgctgggcggattttcctcgcagtctccgttcgcgcaccggttgcccaagtacaaggacgtcctggtgcgtctcgtgtccagtcggtgcgtggatgctgctggagctgctgcagtccgcaatggcaccgcccccagtgtgttgcggatccgcatctggaaggagctcatcgctctgtgcaccaagcactggcggtgcgagaatgtgccgattggtttcgctactacaacgaacgcgctgctgcctggcgcgcctgtgatgctgcgtcgtaaccgcgtgtcgttgctgttcccctcggctccgtcgattactgcggccttcgtgccccaagcggagcagggctccagcactgccgagtgcgtggcggacctggtgtcggaggtcctcccggtgttcgacgcgttcccaagccagagttttcagtcgttcatccaccgcgaggtagcggacgtggtctcggactggaaggtcgagtcctttgtggcgttggcccgtcactgcgttcgtcttggcctgaacccggacttcgtcgctagtgctccagtcactggccaaacgatcagcgctgagctgatgctcgcgcgctccatcctccgcctcagtaaactgctgggcggcgacgctggcttccaggaccaagtgttccacgacctggtggagctcctgttcccgtttgagctgtcacgtggttcgggcgcgtacaagtcctcgtccccctccagcgatgacgacgaggagatgaccaacgcctcggaggatttcacgatggcggacgccacggcccctgccgactactactcgaccactcgtcgtgccttcttcgctggccacgaaatgtgcttcgcgctcgaccaggtggcctcgcgtacgatcgatgaaatgtgcaaccagtcgctgcgcgtggtgctcttcctcgcgtatctggtggacacgcgccctgcgttcctgagctcggccacgctgagcaaaatcgtgcaagtgtacttgcccaggtctatcactgtgtaccagcgttggcggctcagccgatgggttgccagccaaggcatcacgcagcccctcgcagacgcagacccggccattacgtcgtcggccacgttgatgccgccgctgctgcagatgttcctcctggacgtcaacaggaagctgaaccgttcgggaagtttcaagcgtgcgctgtcggtgctgcagctcgcaagcgccagcaacaacgtccgcagtgaggaagcgcacggcgtgctggccacgttcacgcgcgagatcttgcagttcgtctcccagcccaacgactcgctcgtgcgattcctgcacaagcgccagcagttccgactcctgcgcgccatgttctgctgcaacctcagtgacgtcagtctgcacggctccaggaagggcgaggccgcgagctcgcagcacagcgagcaggttcatcagtacgtgcgctccattggcgagtgtctggcttgcgagggtcaggaggctgctgcgcgtgctcacaatgaggaggacgcccgcgatcacgcgcgctggtgcttccaacaggccatccgctgcttcagcatctgcctgtcgaacttcttcgctgaacggaagccgcgctcctcgcggtcggagaaggcccttgagcagttcatctacgacgttgtgggcttgttgaaggagacggtgcctcgaggattctacgaccaactgctgagcttcctgtggacagtggtcacgcaggcgctgagccacttggcccaccacgatggcggcgagcggagctttgcactgcagtcgtttatttgggtgaatgtgttcaagtattccgtcgaggagcgactcttccgcgacgcgcatctcgcgctcatgcacacggcggagttgtcggcagctctgggtgggtcggagtctgcctcggacgctgaaggaacggcgagcgagtgcgtcaactacctggtgaaggagctgtaccgttacggccacctcgacctcatctgcgagctgcagtgggggtctctcgagtctcacgtggagaagtacatcctctggcaggcggccaatgccaccgtcgtccacggtgacggtctcgatgcgggcgcgatccgctactacaacttgctgttcaccttctacatgcgcaagcagcagccggccaacgctgcgtcttcgctctacgcgcttgcactgcggctgcacctggcggtgtcgacgtccacggcggctctggaggctcagcgcaacgctctgaacgcggcttgtaacgcgctgcgagctctcccagtcgagaaccgctgggttgtacgcaagctgcacacggaggagctcaagcggccggctctggatgcatctgaaggcagcaagtcggcgccttctctgagtgtggtgacgctggaggatatgcgtcgtgagttgtcggtgctggacggcaagcttcggctgctggcgcttggccactcggagagcgtgctactgagcacgatggacagcgacgaggtgatcgcgctgctggtggacgccgtgaacagcagctgcaacaacactgggaacacgacgctggccgagcgacggagagcggggctgctttccatcgaaatcgctgctgacattgccggcagaagctctggcgcaagtttgacgaacctgacgaagtctctcgcgcgctactgcgtggccagcgagcacccggccgtgtcgtcctccatctcgcgctctgacagcgacctgttgtgggacctgctcgagaacttgctggagaacgcgaccaagctcgagcagtacgaggtggcggccgagaccgtgttggacttctggcagcagcagggccacaagctcacactgcccgagtggctgtacaagcggctggcaagccccacgtcgggaagcccggccaagctcctgactctgtacttgaagcacggactgctgctcgaggcgctgcagctggtggagggtcttctaccggacgctaccgctatgctcgggggaaacgccaagtccgccttcagcttccagtctcagaaggagccgagagttggtccgcccgagctcccgtggatcccttacaacctcatcgacgcactgctggactcgacctcggccgtgctgaaccaggggacggctggtgacgtctccactgctgcgatcactcggctgcgcactcaggaccacagtctccgcgagcagttgacgcgctacttccgctcggcgaacgcattgcagcaagcgcaagaagcggcgcatctcgcacgaagcagcatcgatctagacttgtagacgaggtcaactgcagcgtagtaggttaatggttcaattcatcaagtgacacggtaaactccacgtactttgaggagattgcgagggcaagttgggatgaaatgaaacacgtctctaatttgtttgttgatgcagcttcctatccttcactctacgactcggggagattacgaccgcctcggcttctttgacttcttgccgcctgcttgcttgccgcccttggcctgcttggccatcgcctccttcacaatctgatcgtagtcgtcggcgcttgcgaacatcgacttgcgcttgtcaccagccttaggcggtgtctgtttcttcctcttggcctcgagtgcctgcaactcctcctggaggacttcgtcgtcgtcgtccatgccgcccatgacggagaagtcgaaggcatcctcgtcatcctcttcgtcatcttcctcgacgtcgtcgtcttcgtcatcgccctcctcctgttgctcatggtcagcagcatcttctccttcctcgtcgtcgtcctcatcggcatcgaacgtcgcggcttcctccatctcttcgtcctcgccctccagcgtcggctcctcctcgccatcggagtcgctccagtcagccatgtccgggtcttcatcgtcgtggttgccgtcttccatgatgccttcagccagctcctgagcgtacgcgtcgatctcttcgtcgtcctcgtcgccatcttccatgtccgagaaggcgtcggcgtcgcggtcgttcttgctcttcttcttacgccgagggttatcagcgtcccgcgacgcacgctccttgaagaacttgtagaagaactggtcgcttgcgtccacgttggcctcattctcctgcagcacggcctccgagttaatgggagcgaacgtccagttcttcgccttggcgccgttgttgccgctaccctccgccaccttgtggcgcggcttcttgttaacgaatttctcgaagaaagcgtgcatcgtaaagtccacaagcggatcaccagcgtactggatgcccgtgtccttgttgtcaagaagctgacgggtgaagctctgcacggacgggtggtagtggtgcgcaagcatctgaatctcccaggcgcacgacgtctcggcgccagcgaacagcgggttacgcttgctggcatcgtagcctccctcttccttgtccgcgcctgccttcttgttagacgtggtcttagcagccggctcgtcgtcgaagctcaccacagcagcctccttggacttcttggactccttctcaggcttgccaaacatctgcgccaggaccttagccgagcgctctgcgtccgtcagaccatcgttcaacttgctggagccggcgtcctccgtggtgtcatcatcttcatcgtcagactcctccttctccagctcgaacgcaggggcttcctcgtccgtcttggcatcctcaaagtgctcgtcgtcggcagcattgccactggccgatccagcttcaggctggtcgagcagcgtgcgcagctggggcttcaccttaagcagctcggacagcaggaatagcacggcacaagcgaaagccgggggcatcacactggccagctgcagcagacgcttggtgaaggcgccagcgcgtgcaggcgatacgtcggccttcatggcgcggaagatcaggttcaggaacagcgtgtgcttggacgtctcgcgcaccttggggtcgatgagcttgccgtagagcgcagtgtagaaccggtcagagaccgagttggtgctgctcataacctggaacagcagcataagcgcctgcacgctggtgctgtggtgggcgcggtgcacgacctggaacagcgagtcgatctcctgagtgaagttggccgacgttgcgttcgcgtacgggaacgcgcggttcacgccgaccagcagcgcactaagcagcttacggtccatggcttcctccgaggccggagccgccgtcttcttcttgcccttcttggccttcttgctgttcttggcctcctttgggtccttcttgatcttctccttctgctcgtcatgacggtgcacctccttcgagaataggccgaagtacactgagatcaagtggccagccaagtcggcgtcgacgtcgccctcgaggtagatctggttcaggaagagcacagcgttgtacttggcacggtccgacaccttgggacgcgtgagcaggcgctcaacctcgtccaccacgacgcgcttcatggccgggtgctcgcgcagcagctcctgcagtatgcggtgcaggtaggcggcgatcttgcggtccgggtcaccgagcttgttgacgagcatggccagcagcacggcctcctgctcgggcttggcgcgcagcagcgcgttagccgcacgcaggcacgcgcgcttgtggctgtccacggcgtcgtccatgccggacgccagcacgctcgtgagctgcgcgtaggccgtcttgaggcagtgctcaaagaaccagagcaccaggtgcgcgggcgagtccttggccgcctgcatcgggtgctggtggaagaagcgcagcttggcctcgtccggcagcaggttgttgaggaacaggtccttgagcgagtccacggccatgaggctctcgcgccgcgccttcttgctggccatggtgatgagctggccgatccgcagcaacgagtgcagcggcgagccctgcgacgtgagcgtgagagcggccaccctatcggacagtgtaccggacttcatcatggtggccaggtacttgtcgtcgctcgacatcttgccgctcttgtgcgcgtcgaagcgggccacctcggcctccagcagctgctgcgcctgcttcttgagcgtcagcaccagctcgtccgtggccttgagcggctcggcctcgctcttgttcctgaggcgcggcttgatcttgggctcggcgtcgtaccaggccacgccctcgcccagcagcgtcacgagctggctcaagttgcccgagttcaaggtttgagcgggcttatctccgtcgttagaaaacttcttcgactggttcttgtgcgtagagttggccacgggcgtctgcttgccggccacatgcttcttgtcctgcttggacgcgccgcgcgccgccgcgggcgcagcgctcttcttgccctccttggccattttggcgactgcagctccaatagtgtccgctacacgttttggccagccaatcaatgacactatgtaacttcatagttgaaatgcgatatgcaactacatgggtcagtgaaagcgcgggtaggagctgcgaatcaaacctcgatttgccgccaaaagctcaagtcaaaaatgaccatggacatggctacattgctcagcgagacggcctcgtcggtggccgaggcggccagcgccgtggccgcgagtgaaggtgtgtcaagtgcgaatggccagcttccggcgctcagcagcttcatcgtgcccagctccacaacaacgcacaggcctctggccatcgcccggccgccggccatcgaaatccccgttaacgacgacaacgagagcgaggaagagttcgacgaggagaaccccgagtgggccaagtggaactgccagcagatccgcaccaagatccgcaacttcctgggcaccaaggagatgacgcagacggcgttcctgaagcagtgcgacatcaactccaactcgtactaccgcttcatgaacctcaagggcccgtacggcggctgcgacaaccagacgtacgagtttgcggccattttcttctaccgccgggagaagaaggaggccgaggagaaggccaaactcaaggccatgaagcctaatgagaggaagcgcaaggccacggaagagaaggagaagaagcccaaaaagtccaagacaggtcaagacttgctccagaagattctggacgtggagttgcccgacgcggacgaggacggcgccgtccccgtgtacgacgactgcgacgagatccgcaagaagatcaactacttcctgggcgagaagagcgtgaccaaggccgcgttcctgcgcgcgcttggagacgtcaacagcaacagcctgcgcaccttcatgaacatgaagcgcggcgctggctctggcgcggccaacgtcgtctaccgcacagcctacgccttcttcgagaagaaacgcatcctcgagggcggcaagaagaccaagaagcgtctggagaacgaggtcaagcagggccctgccggattcccgctgcgccacgacaacggcatgcgctgggtcttcgtggggaaggagtagctgagtgaagagagggataacccgaactgggggctttaagctcaacttccatgtagctgcgtaacccacttgcaatcaacgcatttatattcttcaattcacgattcaaccagagttcatggcgctcgtgcagcattatggcgtgacatcactgttcccaacgttttacgcgcgtagaattcaaaccatcaaaaccgactcgcgacaaacggagggaggcaatggacaacatcgcgcagatgctacaggagacatcggaggcggtggctgctgccactggcagcctcccttctactgccgcttcgattccggctagtggatctacgccaatcaatgcaccggtggctgccgatgaggaggaagagtacagcgacgacggcttcgactcgcaggacctcaagtccaattgcaaccagatccgcgcgcggatccgcaagttcctgggcaccaaggagatgtcgctcaaggacttcctcaagagtgccgagtcaacccgggcccctactaccggtttatgaacctcaagggccccgatggaggctgttccaacactacgtacctcggtgcctccgagttcttctaccgccgtgaacggagagccaaactggacaagaagaagcagaaggcaggtgacaagaagcgcaaagtcactgaacagcgagaggagaaggccaaaaaggccaaagacggcgccgacctactcaagcggattgaggagaccgaactggaagacgagggcgagtgtggctacccgccagtgttcgacgactgcgacgagatccgcaagaagatcagcgtcttcctgggcgagaatatcgtgactcaaaccgcgttcctcaaagctctgggcaacgtggccaacagcctgcgcagcttcatgagcatgaagcgcggcgctggctctggtgcggccaatgtggtgtaccgcaaggcctacgtcttctttgagaagaagcgcatcctggagggagtcaagaagaccaagaagcgtctcgataatgaagccaagcagggctcggagggcttcgaattgcgccacaacgacggcaagcgctacacgtactacctcgtctcggagctggagggtcagttgtaggattcgtgtgtggaacaagccaatgctaacgctagggtgtgaggaacaagcatattcgctgtggctcggtactgctctgtataattccagaagcaggaggcgacaacgaaaagtgatagagcgaggaacgaatgatacgccagcgacggtcagatttactgcttgagcgcgatctcgtatgtctgctcggcgatgctgcgctcctcgtccgtgttgacgaccatcaccttggtcttggcgttgtcggcctggatctcgacggggcccgagcccatcatggacacggcgttcttgtcctcgttgagctcgatgcccaggaagccgaggttgcggcacacgcgctcgcggatcatggccgagctctcgccgatgccggccgtgaagatgagggcgtccaggtcgccacccagctccagcgcgtaggcgcccaggtacttgcgcacgcggtgggcgaacacgtccagcgccaaagaggccgcggggtcgttgccggcgcgcacacggtcctggatgacgcggatgtcgctctcgtcgcagatgccgagcaggccgctctgcttgttgagcatcttgtccacgtcctggatggtcatgtcgagctccttgcagaggaaggcgtgcagggccgggtccacgtcgccgcagcgcgtgcccatgacgaggccctcgagcggggtcatgcccatgcttgtgtcaatgcagcggcccttgtggatggcggcgatgctggatccgttgcccaggtggcacgtgacgaagttgcagtcctccacgggcttgccgagcatggccgcggccttcttggccacgaactggtggctcgtgccgtggaagccgtagcggcgcacgccaaagtcctcgtagagcttgtgcgggatgccgtacgtgtaggccttgggcggcatcgtggcgtggaaggccgtgtcgaagaccacgacctgcgggcacgggccgaagacctccgtggccacctcaatgcccagcaggttgccggggttgtgcagcggcgcgagcttgatgttggccttgatggcctcgatcacctgcgtgtccacgagcgaggccttgctgaaggcctcgccgccgtgcacgacgcggtggcccacggccttgatgccgtcgaggtccgagccgaagaacttgcccacggccgtctcgagcgccgtgcggtgcgtgtcgagcggcagctcgatctgctccttcttgcccgtggccagcgtcttgtgcgtgatgcggccgttcttgctgctgggcgtggacagctccacgaggcccgtgaacacggcggcgcccacgccctcgggctgcaggtcgaacagcgagtacttgagcgatgagctgccggcgttgatcaccagcaggtgcgagtcggccacggacgccgagaaggcgcgcgcgccggccagcttgtgcagcggcagcttggacgacagcgagcgcagcattgtggtgttatgggggtggagggggacgaaggagcacgaggaggacggagacctgtgcgctgccgggcgaaaatgtcggaatgacgcaccgtggcctgtgcccggcggttgttggatgcacaaagagtgtcccgtggtcatgcaccggttgctggatgggggtgtccacgatcattgacggctctggactcgactccactgggcaacggagctggttgcagtgctgctggttcaaggcaggtggtggggagatgaagctgcggtcgtgggggctgagcgtggagaagaagtcgacgtgcacattgcgtctgcggcgaatggagcccgcgggtattgcgcgtcgctaaatgagggtgtccacactgtggccagtaacagcgcacttcaaatcgtaattgaagcatagatacgcaagttttacatactggaaccgagtgacgaccggcggattagcgcaccctgatgtgtttgttagagaagacagtctggagacgtcaccccggcgacgcactcatcccaaggacgtccgcacccgacaaccgagcggtgactggcgctcggcgcgcggttgcagcggcccgccacggctctgggctcatcacacatcgcgaatttctgcttggtggcaccaagttggtgcgcagctccttggatcgtgccgttcgtctacggtctcagttaaaaccttcaaggtgagatcattgccaaaagtcctcgtgagctggtgatgaaatagcgacctgtgcaaccagcaacaagacgtggtgtgcactgcgctacagtggcccacgagcacagcgtgacggcggagaaagcggtggtgcgcgtgggcgacgctgaatctgcttctcgtccgtggcgcctgggctcgtttgtgtccgacgacgcaaagaaccaagcagaaattgtgaggcgaaggttgagatttgctttgggtccgcacggaagctgcagtgcactggagcccagtgactgggctccattgcagcgtgcatggagtgcagtgaaaaactcagcattgacatcaaggaatcgacttgtcgattctgagaaaatgggctgtctcgactcggcacataccattaaaatggagcatgaaccttggtcgtgaacggaatgcatcaccctcgagagtctcgagggtgctgcattcctgctctttgttcggcgttgagtcactttgcaaaagctattttctttgcccatgccttcgctgctggtcgtgcgtaattaattgttggaactttggagcttgcgggcagtctgaggaactacgtgatgtatcgccaccgttgatcttgtgggggttcctagccatattaaccaagcacctacaacatattgcttgttccttggctttcaaccactacctacctgacattaaggtccttataatatgtacgtacgaagaatggcaaggtgatacgacagttaccgtatggttccggtactcatattcaaaaagacgtagacgagagcttcagtgtccttcatgcagctcgaggttttataattcgctcgagttatcgacaatccgtacagcttggccgtccttattgaaatgccatcattagagtgaatgggcgataaggagctgataattttagtgctatgttgaagtgattgagccaatcacagagcagggttttgaaaaacctgttgccaaatgcgcaacagcttcagcttggagaagaagacctgcagactctgcattgatgaggcaagttcggcaacatcgacgacctcttcagcgttcgcgaatacactgacggaatacatcgccgtactaaaaagacaaaaaggagaacattgttgttatacttcgaagtattcacctactgcggcacttagatgggacggattcactatagcggaaattgcagctggagccaagatgagaggatggttgtctctcattcgagcctgcataacgtctggcttatctgtctgagattcctaggtattggcagcagcccagcgtcctttattttcttagatacgtcgaagtagctccagccgccttcattccacttctcgaacttcttgttcatgtagctggtgtccttcagcatcttggaaatctgggaatccgagaagttcctacactcttccttggtggtctcctcgctgtcgtcatcgtcgctttcttcgctgtcatcgtcgtcaacatctgcgaatcgggccgttcgcagattccgcgggccgtagttctcactaaccgcgtcggtggactgaatccggcccgtggtggccgcttgggaggtcgatgctgtggctgccgaaacgctgttaccactggccaggagggcagccgcaagcaggacgtagctcagatgcatcattaaacgatggcggtggagggtttagggcggttgagtgctaggtggcagattgcagaatgaaatttcgataacttcaacgaccagctgagtgatcattgatgcgcagcgtcttggcgtgagaactgatgtgatgtcgtacaggtagggcacttgctggtacagtacgggtagcccgattgagagagcaactcggttatggctgcaccaaatctgccgccagtgggttgaaagttgcaacaaacacacatgcttccgaatctccagtacaaacgaacactgagcaagttggtttctctattcacgagctacatgtatgtatgtggctacattcagcaaagtaaatcgtcaaaaacggatgttcccggagttgctgaagctgtagccacaaactttggtgcagagcccttcgctgaggatttctctaccgacggcggcgtgcttcttgatgcagacaccgcgtacttttgtttgggcgtcgcccagttcacttctggatcgggctcacgtcgctctcttcgacttaagtctagcggtgctgctgcttgcttgatctgacgaaccagggtgagaatttcctgcgtcgatcgcatcttttggcgcggtgtcgtccgctgggaagcaaacgaagacaggtcgtctaccgtatcgatggacgtgaacgacgcggaatcccacatctcgtgcgcgcccaacgttgcttcatcagtcaccagtgtcgtctcgttgatgagcggcgccttgctttctgaagttgcactattgacggacgcacgagacgaaccaagaagagcccgggccagagctcggctcttcccactcacgcgtgggcgaaagctgctgtcgctgagaatgctactgctccgactggcattaagaccaagtcggtcgccgagagcactgcttgtcgacatgccatcgtccgaatggcaggactcgcaccgacggctagttgataatgagcttggcgtgttctcaaactttttgtccagtagcgtctccaaagctcggcagcggcgagtgagctcttcgatctgttcctgtgcttgattgtcatcttttcctcgagtgcttccctctgcagaaccttctttagctactgggggatctgtttgtgtctcaattgcacggacgctcggtggcgtcatgtgttttgtcccgtcaagttgttcagctaattgtgctagctgacgcttgtgctcggccttcatcgcgctgatagcttcttcatggtccttcttcaaatctgctagcttttcaggaagaagctcctctagcactcgctgtgtggcctcatcacgtattcgcgcttcaaactcttctctgtctgtctgctgcaatgattccagctttttgagtgcatccgctagtccttgcttctccttggcgtgctgcatttccatttcgtcacttccctcacgcagctgtcggattgtgtcttgcagtactcgcacctctctgtcgtgcagttccttcgtacgctcctgttgcttctttagtgcctggcattgcctctcaagtgcgatagctccctcctttgcttgcgcaatgacctcatgggtatccctgtgctggctaacgacttgctttcgctctgctcgcactgtgtgaagctgcgcttttaactgtgctacatcgccttcatagcgccggcaagcctgttcatactgaatcgttccacaagcatccaggcatgtgagaaacaaatatcctcattgcttgcagacacaaatacagcgcaagctaccgcacctgttccttcgcggatgaaagctggaattccaaagtttctcggtccagtttcttccggtgttcagcctctgctgctgtatgcttccactgctcgatctctttattcgcagcgcgtagctcgtcctccagctgtgcctcctttttcttgtaccttcctctaatgagcttcaactccacaagagactcgtccaccacccgctgcatgcgctcgtgatgatatccctgcacctgctgcacagctcgatcaaggttggtcatctgacgccgctcatgctcctcaaccgcagcactcatactcgcaatagcatgttccagcgccagaaactgctcagcgatctccaggggcactgccgtcttgagtgcacggcccacgtgccacgaagaaagcgatgactcatcaccacccgcttcattaatcgacgcagactcctttgacacgccatttgcgtcattgccagagctctgaagcccagcaaggtgtgccatcgccgcctgaaagctaatcgtcggctcgtgcgagtatttcctcgtcagcgtctcgagcttctgcgtgatcagcagtatccactgcttcactgcgtcttccctctcatccctccccgtctgaactgccaccgtctcccccaccatttgcctccctctatccctaggaagtggagacgaccacgagctcgccaccgtcggagcccccgagctctcgtcatcggctctgctctccaccgtcttcttccacttgtcctggaactcgctcagctgccgcctcaccgcctgcagctccgcgctgatctcgctctgctgggccaggagctccctctccacctgcttctctctctgttgtgtcactggggtcagcggcttctcctccggcgctcgaggagacgcacagggcgtcggtcgcagccaattggcgctgccgcggacgctagtgacgccctgggagctctcctccaaccggcgccgtgtatacagcgagtggatgtccttcagctcgcctctggcgcgctgtatgcggtatacgcgctggtgctccgtgctggccacgctgctggccgtgtccaagctcacgtcggcctccacgtcgctccagtcgccggcgaagctgctggtggcgcggtcgctgtactcctcccagtccggcagcgtccaggacgcgcccgcgtcgcctctgtcgtcctccgcgtcggcctcgagcgatgccatcgccagtgtgcgttgcttgatcggagcttttgggaatttgaattgtgctggacgcgcgctgattgggcgaaaatggaaaataatgcacttcaacgtgttgcagcaaaaagttgatttggacgctgtagtgacagggtcggaatatatacaagagagggttcggccgtcagtcgtcgaacatgtaggggctggaggacgttttgagacgcttccgacggacgttggtgggggtgccgccgccgctgctgctgccgactgtagtgacgcttgttggggacgacagtgccgcagcgtcttggtacgtgacgccggcgttggccgctcgatgggtcccaggaggacagaggcgctcgtcctgcgcgtccatccagcgcacgtcgttgtcgatctggagctgcaccatgagcgacttggccgtggccagcacccgggcgtcgcgccagagcatgcgcttcttgcccggccgctcatcacccacctgcacctcgtcgttcacgcggaagcgccgccaatcgcgcaccttcgagtgcagtggcatgagtctgggcgacgtgcgggccagccactcgtcccatttggtgctccagccgcggtagtgcaccttggcttggccctcggtgatgcccacgatcgtggcttcgtaccacttgctgtcggtatccagagcgtccaccatttgcccgaccttgagatccgctcgccactgttccagagcttcgggcgacaagtccttctcctccttctcaggggacgacggcggcgttgcagccgatgcgtcaaccgacgcagacgtcgggatgtggccgtggccagtcgctcgctcctccagcccggcgggatacacgtccaccgccagacgtcgacccatgttcaccacctcccgacggacggcccagtcgtagccgaactccatggacaacgcgctccacatgcgctcgctcaccagtcggtagtccacgtcttcaagcagtccgggcgtcaggatggagcgactgcagcagcggcaactgcgcttcgtgtccacgatgtcggcgttgcggatgcggtcgtcactgcgcgagtcgccgcgctccaccacgcgctgccaccagttgcaggacacgacgaaccaggtgtcgccgaggcgatagctgcgtgccatttcttcgatgaaatggatacccacccatgatgccgctatgtacggcacacagtttttttttacgttggtgcggtgtgcaccacacagcagcatcaaaccgctcgcttatgctgggctccggactgcagtggctgcgtcgacagaggcgcgtgctggcgctggtgggaggcgcgacccgaccgcagcaacttgtgcagactcgattgcctgctgttgcgaagctgtggcagcaaaatgcgctgcagacgcgaggtttcgccatgcctgcagccattttgagtcagatggacctgatcggccgccgctacgacgagttggcgcacgaactgtcgcagtaagtggctggccattgatattctcgctgcgctttcggtagtaaaggctgcctctataaaaaggctgacgaggttggtgttgtgtgtcacctttttgcagcaacgacggcagcttgtcgtcggacaagatcacgaacctgtccattgagatggcggagctggagcccaaggtgatggcggtgagggagctgcagagccagcagaatgcggtggaggagctggacgagatgattgcagagcaggagggcagcgacgacccggacgctgtcgagctgcgtcaaatggcaaaggacgagcgtcgcgagctgcaggagtccatcgcccgtctcgagggcgaggtcgtgcgtctcatgctgcctcgcgacgaagccgacgacaagagctccatcttggagatccgtgccggcacgggaggtgacgaggcctgcctgttcgctgcggacatcctcaagatgtaccagaaggtggcgctggccaagggctggaagttcgagatcatgagcatttctgagacggacctcggtggatgcaaggagtgcgtgtgctcgttaacaggacgcggcgcttacggtcgcatgaagttcgagagtggagtgcaccgcgtgcagcgcgtgccggtgaatgatgtgcgcgtgcacacgagtgccgtgtcggtggtggtgctgcccgaggccgaggaggtggaggtggagatcgaccccaaggaccttcgcattgacgtgtaccgcgcgtctggcgccggcggccagcacgtgaacaccacggaaagcgccgtgcgcatcacgcatatccccaccggcatcgtggccgccgtgcaggacgagcgctcgcagcaccagaacaaggccaaggcgctgaagattctgcgtgcgcgcgtcttcgacggcatccgccggaagcgcgacgccgagcgccagaccatgcgcaactcgcaggtgggctccggagaccgctcggagcgtgtgcgcacgtacaacttcccgcagagccgcgtgagcgaccaccgcgtgaacgtgacggtgttcggcatcgagcgcatgttgaacggcgagctgctggacgagatcgtagacgcgctggtggtggacgagcagaaccacctgctgcagcagctcgagacgccgtaaattcgtagaacatgtagccatttgttcctgcaaaacatagatctcatttgcatgtacatgcagcacatgcacattgccgccatgaacttgacggtgcgacgtgtgtgagtgccttgaaggcgaggcagttggttcagcgattgctggcccccaccattacggccgcccgagtcacacggatttgtctccggtcaagaagcgcaaaatccagcccaccggactcaaggccaacaagttaacaagcatgcaataacgcaacgaaaatgagggcgcgtgttgagttagcgctaaatagtggggcctggtcggccgtttcggggtctagatcatgaacgtctgcaataaaataacggcgtggccgggcgttttctctcactgggcgagcgctgcgaccgcgctgtgtccgtcctggtagccgaaggagaagcggcggcctactacgcccacgcccatgctgacgctcatgctgctgcgtcgcttggtggtggtgaactgctggtcgtggcggcgcacctcgcgctgcatggagatgctgcgcgagaagcccatggcggcgcgggtattcttggccggctcggcgtccacctcgaagaagcgcgcgacgagcgtgagcagcgggcagccgcgcagctggcaggtctgcagctcgatggggttgcacaggttgaggcgcatggccagcttgaggaagaactggtcgagctcgctcgcgcgggcctcgagcttgtgctgcgtgagcagcaggtgcttcttggggaacttgtcctgctcgaagccggcgaggaagtggcagcgctcggtgcacgactggtgcgcgtcggtctcggctagcgccttgctgagctcgacccacagcgcgcggatctcgcggtagcgcttggccacctgccagcgcgcgcggccgcaggccacctgcagcaggtagagccacgtgccgtcggccgagaggcgcagctcgcccaccttgacctgcagcgtgctcaggtcgggcgggctctgcgcgctggagacgtccatggacatgcacttggatcggggcgcggcggtcaccatggcggagatgcgatcgatcaacggaggagctctgcgctgcagcgagcgaattggggaatgagccgccgcgtccgctcgccggcctgacctgaaccgagcgagttcaagttagtcagctctacagaaacgcagaaagaggtgcagcgacgggccggatcggcgggattggtcaaaaccggctggcagtcgcagctgtgggatgcgtcagcgtcgatagtggacccaagtcaaagcggtgtctgcgactcgcaggctggaagttccagcaagcgggctcctgtgatcgcctcgctctcgccgacaccttcgaggtcaatccagcggggataggccgatacggtctcgccgcggcgtggctgtccaccacgagaccccaccaaaattgtgcccaccggattgcgagtcgcgcgtttcagccaaaacagatcggtgcaagtgtactttcgttcgaggggtcctggatactcgagtcgcactattactgcagcgggtccctccccgaatcagggcaagagagaccaaggctttcggtccaagcgcgccgtatttgttgtcaacctccgagctcctcgcttcaagctggcgcgctggccatcggcacggacgccgcacacgcagcgctgcggtctccgcaatgcaagtgctggacaaccgcgagcagtccagcgctgatagcctggtatcgccgagagccaacgtggcgggcggcgcttctggcactaacgtattagagcgtggctctatctttctggtcagaacccctccggtgccacgcgcgcggcaacgctgccagagagggcctctacggcttcatcagctccgtggtccgatccctaggccctcgcctgaccgacgttaccctcgcggcccagctgggctctcgaacgcttcagcggctccgattgctcacgcctgatgctgctggccaccgccaagcggaccatcatggtctccatgctgtcactaaccccatacatcttttagaaaaccatacatcttgattacctacggtgagtacatgtactactaccaggtagtatttggcttgcaaccccaggtgctcgccgcttgtttccgcaacaggctgtctccgtaggtctgactgcaacaaggaaccgcgtgggccaaacacgccgaaccgtactcgctgtggtcaaccgcgtccacaatgtagccatgtcgcaatgacaggtgtagccatttatgcgcaggagcgaccattgaaagatttgctagatcatggctgcgctgctgcaggtcgccgacctcttcgacgcgcaggccgccgaggccccgatccaccgcctcgtggctgtgctcaatgcccaggccgcgcagatccgcgaactgcaggaagcgctacgtgttgtgcaggccacgcagcgccagacgcaggccggctgcagcgagctacgcgccgccgtgtcgccgctccatccgcgcgtgcaagcgacggagagcgacgtcgctacgttgcgacaattcaaggctgtcgcccagcagcaactgcaagcgatccgcctccagctggagaccaaggccgaccgccaggagctccaagacgcggagatccgagccaaaacgcgctcggaacagaccgccaaggagctccgcagcgagctcgccagcctgcaactggtgcagtgtctgcagaccgagcagagcgagctgcacgagcggttggagacggttgacagacggttggccgccaagatggacaaggtctgtttaacttttcacgttgaagttgcagccgccgagtgcttgtaattgtaacctgctgggggctggtgatcattgtgtgttgttaatacgtacgtattatccagtcggaatctgcgcggctcgacggcgtcttggtgcagatccacggcttccgaccgctggccgcgcagctgtcggcgcagatagaagaagtgcggacgcagcagagcaagctcgagcgctcggtcgctcgtctcgacgccgcgagcgacgagctggaagcgatccggcaacacgcggacgagcagcagcagatgctggacgaggctgaagatcgccaccgacgagcggtggttccgcagatccagcggctcgatgactcgacggagcagttgcaacaggcgctggatcaagccaaaacggctgcggctacgagcgaggcggcactgcgcacgctttcggccaagttccattcgagtgctgcggctttcgccgcgcagcttgagcagcagtatcatcactttgaggtacgcggaatcgaattttaagatacaactcggatgtttgccgatctaacgctacgatatccgtgtcgttgattcataacttacagcaaattattggcgaaaaggccccacgacaagaagttgacgctcaattcgcggatttgaggcgtcaagtggccacgaaagctccggattcggcgcacaaaaccctcgcgtcgagagttaaggagctgcgctcgcggtgtgagaagttgcaacagcacgtcgagcttagcacgcgctttttggactggttcgcgcggcgtggggaggcgtacgagcacaatttagagctcgtggaaacccaactgggtcgtctagcaatgacttcgcatcctcagagtcgtgagccgtttggcggccatgtccgctacccacgatcgccctagatactatgctgctacttaatggagcgggtgataaactgctgaaataattcgcggagggaagctcgctcttgttgctgcttcgatcgcgccgctgacttcattgcgtctgctgctggggccacaaacgttttctctgcgggtcgaacgatctgagttgacggtgctagagcaatgcttggctcgatgagtttctcctctgtctgcttggttagtgcatcgagttcagcttggcgttgttgctgaacttggactgtgactcgtgacgcccgtcggatgtggtgctgccccggtttaaatggcgctgtgggttctggcttattgtccagggaggcgacagggacgaagatggattcacgaggcgttgctagacggtggcgcgtgctattcggatcagcattatcgccttcgacctcaagattaggagagtgaacgtccgtgtcggcgtgctcctggttttgattgtcatgggcactaccgagcaactcgggtttctcttcatccagtttataggaggcaactgaagggaccacaatattgggagaagtgccgtccctcctgttaatggggcgacgtggtacaagacttcgtggtatggtcacggccgacggaacccgcacattgattagtgtgcgtcctgatgagggacgtccgtgcacgctctcgtcttcatcacgacatggtgcgttttcatcgtcatactcatccacggccggggccacatgaggtcgaacaccgtcatagatgatacgaagccgctcctgctccacttcgaacagcaactccgtgtagtccttcttcattttatcgcgataaggccgatcacccaggcacacagtgtccccgcagcatcggaacagttcgtccatggcttcgacacaggcgttggatgcctggttgagtttcgagaagagtgcgtcccgctccttctcctcgcgtagccgatgcgtggagatcgagcgaaagtggcggcgtggatcacttgcaaacatctcgaagtcccacaacgatttcatgacacgctctcgccaagacacggtggtttgaactcgctcccagagctgtaccgccattggaaacttgtcgtattcatcggcttgtgtgtatctgagcaccaggtccagcttgtttttcggtggcatgagtagatcgttgagcacggaatccaatcgacgctgaagatccgcgcggagtggcagcggtgcctgactgtgactcggatttggctcggatgttgacgtctcggagtggtggccggactgaggtcggccagactgaggtcgaccaggacttgctgatcccagcggtccgcctccagctgagctatcggcgaagtgcttctggatgaggacttgctgcgctgcatctttgtctagcaacttgctgtggcgggccatagtagctgtcgactgcctcgtcagcatgatgttcagagcggacttgcgagcctctgtagctcgagaatcctcgacttggtttttggacggtgactcgagttgggaggcttccgcttcttcatcagcttctccatcaccttcattagtctctggaacagcacagcaatcctggcctgaaagccaaatattgctatcgtctctgcttaaaactcctctgttgctgccttggtgttgctgaggactttgcaaaggcgacgaaactaaagatttcaatggcgagtgcagtggtgaaggcgcgacgagactgtctcgagacggcgaagatgacggggagcgactggtccttggtagtgaaaaggaagaactccgacgtcgaccctgaaacggtgaaccagcgacgccaacaccacgcggcgatccgaacccgtcttcagatggagcaccccagctttcagcgtttccctcatccacccaccacgttgtttcggagacagcggctgcgctgtttgcgttgtttggactgacaatacttttctttcgctcagggctttgttggaccatttgatctgagggtacggctgaagcaagtcgcgctcgcatgacagatcgtcgagcgtttagagatcggtagaattcccgcagttgatcggctacatccgtagctgactctggagcggtgggtacttcttctactcccgaagtcttttgctcttcctcttggttcgcttcgtgtggcgatccactggtttgaggggagtttgagtcaacagacccaagttggttgaccacctcgtcaagattttgctctggcaatggcaaacctgattctggatcatagttcggatagtactcgtgccgagaccatggtattttctggggagactgcgcagacgcatcctgtaagaagtctcgatcatcattctcagcgcattcggacgacaaatcctccattgctcgttgcagtgcctcaagcgctgcagctcgctgctcggcctcgacgcctgctcgatagtcacgaagcttttcgtcgcgaacctcgtgccatcttgcaatgttgatctcagttgcagtcgtcggcgcagctgtggatggacgtcgcgccgacagagaattgcggaaagttcgtgcgagccgcctcgccaccactgctggagacgaagacggccgtcgcggttgtaagaggtttgcgaccgctgcaagcgctggcggtaatgcctttgagacattgaagaatcggtgcaagagggcctcaaacgtgagcttcggcagtatcaaggccttagcaccttcggacgactgggctgcgagagttcgtggccagcgttctgcgtttcgaaccatgccaagctctcctagacacgctggagctggaataacaacaccgccacttggaggtggactgttaggtcctgaaggtgattctgaagcggtcgtagaggtcaaggatccgtccattacaacgatgagcgaatcaatctccgtgtttcggacgcatagagtgtcgccaggggccagcatctgccaccttgcagctctgctcacttctagaagctgctcgatgctcagactctgcagcagcggcgtcgtcaaaagagtcgcaacgaatgtgcgcaagtgtctaacggtttcttccctggacagcggaggctcgctccacaaggggtaattctcgcggcttcggtggtacaggaacgcggtcacgcgttcttggatttgagtcaaggtctcgtccgaaagctttgccggcgtgacgggtgccgcctgtaacgagcgcatgcttgcagatcgactgccctgccaagtcttggcaagaagtcgttccagtgcctgcagcttgaaggcgtgtactgacttgaccttgtctggctcggccgtttgctggttctgacttccacgacctggagcttcagtgggagcactcgccgcccgaggggacagtgcgacatcaagatcgctcggcctgcggctcgtgatgcccgcactcttcaccttcctgcggagcaatgggtgcttgtgaggcactttcttgatcacacagaagcccggcttactgacgccgtgaaccttggccataggtacacagggttcgctatctgcctggtgaatacactccatcactgcgctgatcgtgacgtgccgccgtagctccagtttatacagtgaagctaaccgcacagcctgagcttcttggggaagaacgccgttggcttcactgcgacggacgaaagctcgcaccaagtgataaatctcctcacccaaggccatcgcagctcgtcgtagtcgacgataagctctgcgggaatccacgaaagcttgggaggagctggaggtgacgacgcagtcggcgcttggatccgacgcagccatcaagagcatctgccggaactgatgcggctgaccgcgcatttgctgcatcagtcgagccacgtgctgctcgagctgctggtgccacggcgccttcgggtcgggggcttcagcggggacctgctccttgacgcctctgtcctgcaggatcctcgcgactttctctcggatgctggccggcatctcggcgggcagcagcgcgtggtcgcatttgcgctgatcccgcacagtcgtgaccatccacgccccagccccgttgagcgcgcgctgcagcgccagactcgccttcttgcccgcatactcctctcgatccgcctccgagatgtcaaacgcggcaatcggagcctccatcgagagagcgctctagtgtttggtcttactgatggctacgcagaagatggcaatcgtacaccaatatagcaggcaccaccggagtgacggtcggaaagttgcctttatgtgccccacttcaacgacacagaacattacacacaaaataggtcaacacttatgaggaggccatcgctcccacgtcaggactgaccatttagcatttgggctcctcgatggcacgtgcgtccccgttgcacgctcgccccgccggccagagcaagcgccgcgcgtccaccataacgccgcccaattctcctcgaaacgggcctcgcgtgggcgcattggtgctcttctcggccattggcctctacgccttgggcttcgtggtctggggcttgagtgtgagcggctccttcagcgtcgcactgtcgtcctcggactcggacaatggcgcggacgtgcgactgagtccgctgctggtcaggcaactgaggcggcgacagagggcagagaacggcaatcagatcgccgacatcgcgacggacacgcactggatggagcagctactggacgccggcagcagaccgccggacttgcgctgcgtgggctggagacagacggacagttgcgacctccaggagacagaagtgcccacgaagaacagaggctgcgaccagttcgtgcgcggcggagtgggcggctattgcctcatggaggacgaggctacaggccagcagatccaggtcatgcacacggcgtgtgatacgctgcactcgagcgtgatgctcagttgtcgacatgccggagactttgtggatttccagtgggaagtggcgaaattggcggcggcgattaaacgggagaaggaggcggaagatagcggagacagtgctgctggctcgactgctgcggccccgaaagagggaattgtgatggtgatttaccccaaactgcttgtgagcgcgtatgcatcgattcgagcgttgcgtgcggtgaattgcactcttccggtggagttgtggtacattgagtcggaaatgacatctggggtcgcactgctggatgatgttcccaagaaactgcaagaagcgtatggcccgctgacactgcacccgatcacagacccgagagtagctggcttcaactcgaaggtgtacgcaattacgcacaccgagcttgaccacgtgctgtttctggacgcagacaacgttcctgtgagggacccgagctatctgttcacgacgcccgagttcaagcagactggtgctgtcttctggccagacttctggcatccagcccacacgattttcaacatcaacaacgattcattgttgtgggagctgctgggtatggagcatgtggacatgttcgaacaggagagcggccagctagtgatcgacaagacacggagctcagcagccttgcggatgctggcgctcttcgccttccacgaccccaacctcttctcgcggtacaagttggcgcacggagacaaggacctcttccgtctcgcgtggctcaagaccaagaccccgttccacatggtcgccaacccgcctggaattgcaggcacagtgcgcggtaccaagttctgcggcatgtcgatggtgcagttcgacacggatggggaagtggtcttcctacaccgcaacgcgaagaagctgacgggcggtctgagcgcaagttgcaagcccgacgagaagatttggacgcacctgcagcgcttccggtatcgggctgcgtctcctcacgcgctggaggtggaggcggccttcgaggcctccaaaccgacgctaccgccccacgacaaggtcgacagtgggcgcgtgtccgtaggaaacctgaacatgccgtacaagttcctgcgccaaaagtactcggtccagatcttcaacggagcccccgagttcgacgagacccagtggtgctacggccagtcgcagctcacggcgcccaggtacaagaccattgcatgggaagacacggcatttccactggtggagcgagatctactgcagtacgcgggtgaagctgtggcgctgctgccgccgtcggcagtggagcacattgtgcaaagcgaccgcgaggaggcaagttgaagtggccgtgtaggtgtttttagcgtaaaatgtagctatttattcaatttgtaccgccctcgtctcagcggtaagaccaattttggctgtgctcaaagttcggtgctctgcgtatctgaattcccctacccgctcttatcaccgtacgacacctgacccattttgcatttttcgtgatgcctccggcaccgcggacatcgtcatgaggcccgcgctattactccgcgccgccaatgctgcgcatggaacagaagcctctagccaggcgtcgctcatcgtcctcgtcaccccgttctactccgcgttctacctgcgtcaacccggcagtcatgtacacgggtatcgcgctctactccagctgcctgctcttctggtggctctttatgcgcggagatgccaaccgcttgcaggtctcacgctggagtagtgtcgttctacccagcaccaatacagaactctacgcggagagcgccactaccggcagttcacctgctgatgcgttactcgagactttcgcgaggggcatcggcgcgtcgaccccggagctgctggagctgcacaggcgccaccacatcccggactacaagtgcgtagggtggagacagacgagggactgttcccctgacggacccagagagtccgcgaaagatatgaactgtggaggtatcgtcaacgccggagcgtcgggcttctgcctattgcgagatgaaaccagaaatgttcgttgaggatgagggctaacactttgcacaatcttgcgttcgcgtttgactcaaaaccgatcccaccatccatcctaccaaaacacgactaataatacgaacgtacacacaggtgcgcaacttaccacgacaatttcgaagtcagcagtaaaaatcttgttcatggcctcaaattagtatctatgacaccgaattttttaagctcgggagaaagtctaacacacgccaacaacgccacccgtgtcttacaccttcttcatggattctctctctgtgctacagccaatggtttaaatgctggttactcatcgcaacgtcgcgcatccatcgaaatgcacgaaactaaatctgtggttgcccggctcaaaaagccgcctgttcagttgcaccggacagaaaaaatgatcacgtctctttgacattgacccatttggtcagttatcttatcgtgggccgttgccattagggagtgagccggggcttccaggcgttggactccgctggcaatggtctcgctgtcagccattcccaaagtctcgtcgtagcacgaagaagccctcgtgttcgactcacctctcgcactatagaccccacggcaaaaatgaaaggcgtacctgatgcagctgcaaaaacgcgaagctggaaacatttcctgctcggtgcactcctcctcagcaacctgctctacgtcggcatgatcattgcgcgatcgcccaacacgctacgagcaggctttcgagcggccgagtcccgtcacgacaagtcatcagaggaagctgatcaagtccaaaccaactcgacacctccgtcactactacccgatttaccgcccaacacagtgaaggcacgacggcttaagtgtctcggatggagagctacaacatcttgcagtccggatggagatcgcatgccgcagaaagaccgcagctgtaccagcaaagtatcctacggctcatcaggctactgcgaggtcgaagacgaggatacacacgaacggttccgggtcatgaagcgaacgtgcgccaaggccaaagccggatccgtattccaatgcgcggacgctccaggtttcgacaacttccgggtggaagcaaaggatgcggttgaaaaggcccttgctccggggtttgcgctacccaacgtgaacagcagtcagcagcacgcacgtcgaggaatcgctatggtggtttaccccaagctggttgctagcgcctacgctaccattcgaactcttcgagatgtgttggggtgtcgactaccgattgagatttggtttcgacccgatgaaatgcgtaagtcccctgagggcctcgagccgctgacgagtctgagccggagcgatactggtgaaggattgacgttccgggagatcaacgacaccaaggctattcgcttcaacaccaagatctacgccatctaccacagcacgtttgataaactgctgttcctagacgcggacaacgtgccagtcaaagaccccacgtacctctttgagacgccggaatttgtcaagaccgggacggtgttctggccagactattggcaccctggcaacaccatcttctacttaaacgcggactcgttggtctggcagctgctggatatgccgttcgtcgacatgttcgagcaagaaagcggccaaattctggtggatagaagacgccacgctgcaccgctggagctggtcaaattctacggtttccatgagcccaactacgtcaatcgcatgaagctcgcgtggggtgacaaggatctgttccggtttgcgtggctgaagctgaacattcccttccacatgatccagacgcctccgtctgttgctgggagaatgttcggggagtcgttctgtggcatgaccatggcgcaacacgacgcgggcggtgaagttctgttcatgcatcggaaccagatgaagctgacgggtacagtcagacccgacctctctgatgagctgaagaacagtgcggacgagtacccagaccctgcgatgtggtcaacgctggtgtcgttccgtgataaatctgcacgttcggactacgtgattcaggcgcacacggatcatcgattctcgaaggaacggcgctgcttcggccggcaatttctggacaaaagcgctcacttttactctcgcgctgttgaggatttaagcttcgccgggatcgagacacatctgagaaggtttgccatggaagcagcgaaccacttcggtatcagtagttagaactagaacatgggttgtatgtctagtgtttagattgcagaacgtgtaaatatacttgagcgacagtctagctttactgtactactactactactaccttttcttgacgacattattctagttcgatttcatgaattatccagcaactcgctgacggatagtgagtggctggtagcagacgaacagcatccaccgcgattctacgtactttgttctccaagtcagcaaagctcagattggtaaatgcttgcgccacaaaatgtgggtccctctcgagcttccgcttgccaaagcagctctgcgactttggaaatgctggctcagctctgtacgtgtcgatcacgtagtgctcgacttcgaacgagcggttgaaagacagcagatgcgtccagatgaccgcccatcggccaccggcgcctctcttttcttcagacctgcgagtttacccgtgagtttgaactggttgcgatgaagaaagagcacgttgccctcaaggtcgtgctgcgccatcgtcatgccacagaacaggtcgtcaatgatttcccccgccactgctggtggtgtctgggccatgtggaacggggcttcaagcttgagccatgcgaatctgaagaggtctttgtcaccgtgcgccaccttgagctcctggaagaagtttggccggtgaaacatgtagaagaacgccagcttcatcggtgctgcatgtcggcgacggtcgatgagcagttgcccactctcctgctcaaacatgtcggcgtacggcatgtccaggagctcccagagcatcgacttctcgtggatgttaaagatcgtgtggttcgggtgccaatagtccggccagatcacagcacccgtgcgctcaaattcactggagtggaagagtgagctggggtcccgaactgggaagttatcggcgtcgagaaacagcacgcgatccagagtgctgtggtagatggagtacaccttcgccccgaatcccatggcgcgcgtgtcgtcgatcttgtggaagcttatctgatcgtcagagtcggccaagtgatgcagcggcgtgaggggaccggggaagctgtagagttcttgggggcaataccacaactggatcggcaatttgcaacctgattctcgaagagtacgaatcagtgcagatgcgctcgccaccagcttcggatacaccacaatgacgatcccatctctgggtttatcacttccaccctccacaacgttcggcaatgcgaagcctggaacgagcgccttcgcgacggccttcctcgctttcacccggaagtccacgaaggccagcgcgtcgtcgcagcgcagacgggaagcagggaagaggcttgagcagtgcctcctcatgacgcggaagtgctcgccggtgcacgtgtcctgcacctcgcagtagccggcgttggaattgtgcaccgtcctcccgcacggctggtctcgctgcgggtctcgaggcccgaacggggtgcagtccagcgtggcacgccagccaatgcagcgcaaactcctctccatcgtgtcgcccattggcagagctataagtgttcccacctgcgtcgagtttgagtcgttggcgtctgtgagggggctgcggaacggggagagcgaggcgctggaccacgccagcagcagcgccgagtacgaggccaggctcagcagcagcagggagagcagccagcgaccggatgaagaacgacgcggtgtcgctccattagaacgagctgagactttggagcgcgcagaagatcgccattccattctggtgctgcagttaccgaggctggctacgtctgactcgatatgtagcgcagccaatcacaagataggttaaatctcctggtgctcaactcctcattggctgatgcacaggctacataacctttatcatcgtcatttcattagccataaagcgatagcggttaattctctgctggacgatcgtcaggcactgcaattatggaaggctccgcccgactccgcgcggggcccgcagctccagcttcagtctcaattgccgcgtcgcagtcttcgcttctgccccatcactccagacccgtctctagaggatccagccgctggccgcgtctgctgctcctctgcggcgtggtctacgtcctgggcctcgtgctcttcatcgcgtacagccgacccactgctcattccaatgatccgccaccagagcaggagcccgagtccttccagtcttcctccagctcccaatcagacgccgccgcgattgagcgggcggaggagcacgcacgcaacgtcaagatgctcccacagggcggagacaagcgccgcgagctgcgctgcgtcggctggagagccaccgacggctgcagtccgcacggcccgagactgccgcatctggacaagccgtgccacatgatggtgtcgcccgcgcagtcagggtactgcgaagtggaggaccggaagaccaaggagaggttccgcgtcatgcgacgatactgcaaaagcgtccgacaggaaggacagtttcggtgttttgacgcgcaggatttcgtcaatttccccttagaagcgaagcaggcggttagtaaggcgttggtgccgggttttaagctgcctcacatggaagctgatagagaggggaccaaggggatggtcatggtggtgtatccgaagatggttccgagcgcctacgcgtcgattagagcgttgaaggagatcttgaagtgtcagctgtcgatcgagctgtggtaccgcaagaaggagatggagggggtaccggggtcgatggtgccactgcagcagcttgctcaggtgagtagggggatttcgttccacgagattgacgacaagaaggcgacggggtttggcgccaaggtgtttgcgatttatcacagtttcttcgacaaggtcttgttcctggactcggataacgttccggtgagggatccgagctttttgttcgacacgaaggagtttgccgagacgggggccgtcttctggccggacttttggcacccgagaaacaccattttcaacatccacggccagtcgttgctctgggagctgctggaccagcggtttgtgaatatgttcgaacaggagagtgggcagctggtgatagatcgacgacgccacgctgtgccactggagctggtgaaattctacacttttcactcgccaaatttcttcaaaaccttcaagttggtgcacggcgacaaggaccttttccgattggcgtggcttaagctcaagtcgccgtttcacatggtcgatgtgccacctgccgtcgctggtaaggcatttaaccactcgttctgcggcatgaccatggttcagcatgatgccaacggcgaagtgctctttctgcaccgtaacactcgtaaactcgtcggtgagcccaagctgcagcacgtgaagcttgaggcggttgctgctctccgtgcgaaagaaaagttgcaattgacgcaccctggcgggcgtacaaaacctacgcagcaagagatcgaagaggagatacgaaatggtgtcacgacgccctcgccaactctagacgcgcctgaagctgatggctaccccgatgctatctactggacgcacttgctctcgttccgaaacacttccagaaggatacactacaagattgacgtgcatcctaccctcgatggattcacgaaaggccagacctgttacggtgtggctgacatgctggaaaggaacgaccacttttacttccaagcatttgagaacttgagttttggaggactggagacgcagctacggcggtttgcgatggaggctgctctgttagttcgtgcccatgcgaacgacacagaacctgcggtgacacgagacactagtgactaaattatgaatcgggaataagcaggataatctcgactgggttttaattcccaagctctgtagcttcctggacgaagtctcggagtcgatcttcaaggtcgtggtgtaataattctgtccacgacgttaagcgatagtgctcggttgtgagtctgtagcacatcagcagtcctggaaatgcatcgctggtcccgtatataccaacgcggtagttgtccgccaagtaagcgtatcgatctgaggcgttggatcgatggagtgccagctggtcgggaaatacgaaggactggaggtgggtccacgttcgagtctggtcatcgccgattactttcttgccgttgtggtgcaggaagaggacttttccttcggggtcgtgctggaccattgtaataccgcaaaacccaccgttgtttagtatgcccgcgactgctgcaggcgtctcgatcatgtggaatgaggtgttggtcttaagccacgctatccggaagaggtccttgtcgccgtggacgagtttcaattgctggagggggttcggctggcgcagcgctaagaattgaagtactctcagggctgctgctgctctgcgtcgatcaatcagcagctggccgctctcctgctcaaacatgtccacgaagggcatatccaccagttcccagagcagcgtctcgttgtggatattaaagatcgtgttggcagggtgccaaaaatccggccaaaagatcgctccactttcgatgaactctggcgccgtgaagatgtatgtggggtctttgacaggcgtgttgtcggcgtctagaaacaaaacttggtcgaggttcgagtgggcgagagcgaggatcttggtgttaaatccgtcgacgttttccccggaaattccatgcagcgatattggtccatattcgttttccagtgactggagcaaccggttgtttgcgagagggtttgaacccatttcgttctctagaaaccagagctcgaccggcagcgagcagttgtacgagcgcaacactcggatcgtggcgtacacactcgacagcagcttcgggtaaatgaccatgagcacgccgttcttcgcttctgttgatccttgcacctggggttggtcgtgctcggctttgatcgtatctacgagcatgttcaactgcgacgtgactagtgcgaagtctgctgcttgtgtgcagttgaactccacctcgctacgcagtgatgagcaattcacctgcatcgctcgaacttcttcacccgtagcttgattttgcagcaaacagtaccccgacgcaccggcctttatgcccgtatcacagcccacgactcgattgaggccgctgggtggtccaagtgtgcagccatcggtttcccgccatccaagacacgaaaactccgggatgctcagcatgtcactagcagagatgtttggccttcgagttggccaatcggtggcgagcggaccgcctccagcaatctcgggacgacttgagtgcaccgaagaaattgctttggcgacagactcaaaacttttcgtcaatctggccggtggttggctgtcattctggggatctaccagaggtttcagtctggaattcggcattgctgctgcgtcggaaactgcatcggtaccatgagactgacgtagctgaacctgttgatggccccttttcaagggctctggtcgttgcgagcccatccagacggagagtatcaatacgtggcagaacgcaaagatcaggagcaatggcttggcgacccggcgtcctaacggggactggcgcattggggcgcgtgggaatttgatgtttggttgacggcgaaacaggacgatggcagaataaaagtgagagagaccgttgagccccgttggggttggccaaccgcagcaagcttgcatatcttccgcaactggtcattccacgcctgtcgactgtacatttgccgatccgaatttgcgatgtcaaatgatttttagtcactctacagtgtagtgtctacatgtaggattgaaatccttcgaagcacgcgtggaatcatcggatatgcatgctgtggatggtgtcgggaacggaacaagcggatacgagcacgattaaagggaaacggcatggagccatccctcccaactttttgttccgagctatgaaaggaaacgtgacgcacaaaagcgtttggatcgtcatcacttttgtcgttatgtgaattcactggatgcgttactgcagctgttgattatcctgtggaaggataatcgctgacgccaacgtccgaacggataaaggtttgcaatgcaatgatttacgtgttcgcgtagccaaattacacctgcgctagtctcagtttagctagtcggcggcatagtgtggtgtccgcatacgtcgagtctcctttggctggcagagtcagcaatggtagtcatgagggccttccatttacgtcggtcttgggcaagcagtcgaagtctctccaagtctaagctggtgcggaggcggtagccacacccactagcatcaaggtccgggtcgaggacgagaggcagtgtggtgcggggcctacctctccacttgctgctgtcggaggaagagaaatacgccttcatctggataaacgccgggatatcttgtagtcgccgtagaatgtgcccgagaagcccccacctcgcagatgtgatccggtgacggagcggccgctcgtcgcacgttgcgtagagatcagcgttggagatgtggtacgggtaacgcacattgaggacagaccgtagctggcgacggtgaaagctttcgagtcggtgaagctccgttggtgtaagcgcccaggtcccgcagttgtagagtagtatcggcagtacgtagcagttgtagaggcgaattcgtgtcgtgtctgtgatacggtgcgatctcagccagaccgtccagagccgccgaagagcagccgcagcgagtattttccgacgcgatacatcatcggcatctccgagcaacgagccaagcttccgcgtagacctccatgctccttccactgcacgagcgtgggggtcggcactggcaggtgtcaggcagcggcggagaattgtgtgttccgtctttgccgcgttcatttgaagcgatcagcgcgaatacttccggggcatgggtctggatgagctcgacgagggcggggtcccgacagataaagtcggcatcgtccgcatacacgatcatttgctggagcaggtccggcggcattgcagggtgactagctagatctctaagtgctgcttctaggtagataacaaataatactggtgagagtgagtcgccctgtggcgtacctgtgttgctgccgaatggttgctggatctggtggccgatgcggactgaaagcgttgtgtcggatagttagagtcgaatcagccggatttcgtcgtcgtgtagaaactgctgtagaatgttgaggcgtttggcacggtcgatcgtgtcgaacgcgcgcgagaagtcgatacccagtacatgaacgatttcgcgatacttttgtacccgtgcgcacagccacttgtgggcccacaccgcgtcagccgtactgcggctcttgcggaagccactttggtggcctgagagaaacttgtcgaccgcgggtgtgatgcggcggagaacgatgagtgacaccgctttgcgaatagtgttcaggagaactatcgggcgtactgccctcgtggcttgttcggcttctggagacacagcaggataccttggcccagtgggatgggttcaccgcgttcgaagctgcggtttagtagatgtgcgagtcgtggagcaacgtcagcagcggcatacttgagtagttcaccaggaatagcatcggggccagcagcacgaccgttgttcagtcgaaggagggcaccacggacttcgtccggcgtgattgggcagtcgaggggttgagctgttgggtctggcgatacttgagcttgatctggatttagaaactgttcttggaagtgatctcggacaatttgttagctgtgtttctgtgaagtatatacttacctgatgagtcttgaattagaagctgctgtgtcggtttgcgggcgagatcgcggacggcaacgaacattttgtgagagtcgcttgaagcctcgatgcgtgaaaccttttcgtcgagggccatgttagcgaggtcacagcagcgagtgcggatctggtgtaggatcttgtttcgctgagagcgcagcagcgctgtgttggccgatgtgtcgttgtaaatgcggagccggagctggcgttgttgctcggacagcgcggcgagcagcggatcgtcgtagctgcggcagcgtcgttgatccggcgaagaaaacccgatggtctgcgatgctgcttcgtgtagcaaaagtgtcctcccattgcaggttgatagtggatccatcgtcagcgtctggggggggggggggggtaggatccgtttaacggctgatgcgtaagcggttctggagtcgtcgttgtgaactaacacgatgcgtgcgaggtgaacagttgtgccgcttgtgcgacgcgacggaaaccggaggcgacggatgtgcttgagctcaaagtccgcggtgacgatcttgtggtcggacggggtgatggccccaccccaggactgggtatctagacagaaccgtctacaactctgagggcagagtacgtagtcgatttgattgtagacacagtgtgtccgcttgcgctggctccaggtggtcttgttttccgctcgcttggaaaaggctgtattggtagcaaagagttaataagtatcacaaaaggcagccatgaggtggccgttcctgttacgcgtgcctcgtgcatgaggcccgagaaacgtttctccggttaaagtctccggtaatcatggtgatatctctgcgggggaattggtccatggctgctcgaaggtctgcgtagaaagcatctacttcagttagtgggcgcccgctgtatggagcgtaggccgtgacgatgttgatgggtcctgtgttaggtagccgcatctgcaagatgccgatacggtcgctgtgagcccagcaccgacggaggtaaggagtaacgcgaggagatatggtaaatccaactccgtagcgctcttcctgtgccggcaacgttagtagtaagtagtctccgacctcaaagcgccccagctcatacagcttggtctcttggaggccaaggatatcgatctggtagcggcgcaggtctgggggaagcgtttcaaactgcttgtatagcgaacctagggacggcacattgaacgagcctattctaaggcggttagtgctgtcagtgtggttagaacgatacggaaggggggttgtgacgggtagtactgctggtgaaggtggctgccaaagggagagactcgcaagggacttgcagacgcccgagagcgcctgccggaagcccgtgagcggcattcgccgccgtccacgcgttccgggggagggcgtcaccccaaccccaaccaaaaaaggataaaggtttatcaaaaccaacacgcgtcctaccaatagtgcgtgccacagttcctcgatttctgccaaagttgattcagtctctgaagagccacttttggtgtcggcttgaatgcagttctctcgcctccatcgtcccacatatcgctgcactcttccagcaacaggccaaccgaccaaatgtccactgctgtagagtgtgtgctcttcttgacgaacatctcaggggcatggttctcacaattcaaatgctttccgcttgaattgtcggcacgacttaatacagcatgcaagaagtcgatcaggaaccacgagccgtcgcgggatttcatcacgttagaccaaggaatgtctcggtgcatgcttaatcagagcctccggaatatcgtggatggcctggaacaaatcatcgctggagtccggttcaacacgaattccacgaggggtaaacaccaggctcctctcgtcttcattcacagacgccacacgttcagtgtgtggcaggcaccccacgatcttccagaacagtgtagaccagtgctgcttgtaggaaaggttgtgaaagaaaggtcttggtcacgtgcgtgggctcgagcaggatttttacgtcgtcaggccgatggagcaccgcgtatttagcagccccgcttgcaggacacagatccgcgatgctttgtagcaatcgagccatgttcagcactgcaagcagcaaccggaaacgcgaacgcggattttgcaggttatatcctccagtgcgaactgttcgaatagcattcgactcgtcctctgcgcgtgtgagcgcatacaagcttatggaatggagatccgccgcatacccaaacaaataaggcacgtcgccatgaaaccatcgaacctgtttgaacggcgcgcgaggaagcgagtccacaggacggactgttggaccctcttcttcacctcgaagcacgcaaatggagtcgatgaagaaggtgtagtccggaacaccatcaatcgagtatcggctactccacctgttgctgccacgcaagacgaactcgaggatatggtgaattgctccgtcccaaagcgaaatatatccaaatttcgtgtcgcaggatgaaattgacggaacatcggccgagtgatgccaaactcgatccagaaagccaacacagggctcggaattggagatttcgaacgtcttgttcagcactttcgtgtcgattttgagtgaccagatccagacgtcaagcagcgcctcaggtgccccaatctttacaggtagtggaccttgaaggaattgttcgagctcgctgacaggaggcaagtcctcagtcgatactcgctgccccctgaacttctccaaccacctggacgtggctccgttgtcgaatatcggcatcattggcctggtaccgtgggtgtccttcactgtctcgcgaacatgatctgggagcagcactgctacatgaagcacccccgctcgttccgccctcgagaggtatatctgcaaatgcttggcgggttaattaggcctcccgggtgaaatcggctcaattcgtcgcctttcctcacggccactaccaattcatcagtgcactcgatccacttgccctcactgtcctgtgcgagataaagtttgagcgtgtctgcggggcaatcgctttcgggaagcttctccttgacagcttcatatagttgagctccaagctgctgatcgccgatcttcacgagaaatacccctcgccccggcatgcgcatgaatgcacacagaagcaccaacctcaccatctctctggcttactgcaaaatcgcaagtggccgattgtagaaatgaagtgaccgacgtattatgacatgaccagtggatttacagtaaatctgaagaacccaagatttaagcttaatgatgaagcttcacgtgagaaaacacacccgactggacccaccatcacttgagcctagtagttgtttttttcaccagagcgaggcaaagagattgagactggaatacgttttataacaaataaataagaatacactaatagtagtctaccgagtttcgctacagtgcggctgcctcctgggcgaagccgtgcagtcggtcctcgaggtccccaaagggcagctcttcccatggagttgttttgtagtgcttcgactcttgttgtcgccgtagcacatagggaaattccggaaaatgcctccaccaactaccacgtgcggtagttggtggtcatgtactcgtaccgttccgcagcattcgcgttcgctgaagctagattttcaggaaacacgaacgactggagatgggtccacacgcgagttttgctcgtctcctcctcacccatgagctttttgccgttgtggtgcaggaagatcacgtctccttgtgggtcatgttgcaccatggtcataccgcagaaatgcttggtcttcaccaatcccgcagcggccggaggggtctggatcatgtgaaaggacgtgttcgtcttgagccacgccaaccggaaaaggtccttatcgccgtgaagcagcttgaagcgctcgaagttgttcggagtgcgcaacgccaagaactggacgatctccaggaccactgcagctttgcgtcgatcaatcagcaactgaccgctctcctgttcgaacatgtccacgtaaagtgtacccaccagctcccacagcaacgactccttgttgacgttgaagatcgtgttgactgggtgccagaagtccggccagaagacggctccagtctgcacaaactcgggcgtcgagaacaagtaggtcggatccttcacgggcgagttgttcgcgtccaggaactgtaacgggctaactgcagcccgttgcgtggttacacaagcagaagaagtagtaggcaaattgaactctggtattaagtgccgagacggtctcgtcactcgagaccgtcccagccattaaacctatggtgggctctgattggccaccgcgcacacacggtggcgcctgtgtgacagtggcctgtcacaccaccccctactcaagattggaacatacacatatctaaactctagaaaggaactgcagagctgcgcgaggcggatgtgatgctacttggcaggcgcgggccgacagcgcgcgcgaagtgagtgaagcagcgcagcagtgtctcggacgtcatcaagggccggctgcagcgcgaccgcagcagcagcgtgggcttcaacggagtgatcttggtgcagctggtctggcgctggcgtggcatgaagcgagtccgtcgcggtggtacgcaccgtgactccaccgtgggtcaggtcgccgcgaatcctggaacaccgaaggtcgtccgtcgtctgaagtcgagcatcgccgctgggctgtccgttcttgcgaggctctcgttgagttaggcacggctcgccgccgcgccctctgcaagcgacgtctcgtacgccgccatgcagtcggggacatctgcgagtaggacctcgcgtggctcccagctgtcgtccatcgggccaagccatcgaaccaaataccggcggtgcgaaggtatctctccatcgcggcgacgagtgccgcgatccatgcgtgcgcgctgcggtgcatctcggtggtcgtcgtggttgagaatggcttcgacaatgtgacgctggctcccagcagcgtccactaggggagcaggaccgtcgcgctggaatgcagatgcgcgaacctcgggctgacgctgcgatggcgcagcgtcttgatcgacttgggcatggtcatcggcgccaccgggaatggcggcgggatggtatcgtcgcagtcggccaacgtagaacgtagggtgcagccggagtgccgtagggagctgcagcgtgtaggcgtcgccgagtaccttcgtcactttaaaaggtccaataaatcggggcgcgagcttgttcgcgcccaagttcgtcaccaaacttggcgacatgcccgtcgtagagagcagtacccgatcgctcatggcgaacgtctccagatgtcgtcgccctcgtcgatcggcatattccttttgccggtccaccgccgccgcgatggtgtcgcgtacataacgcacaaccgactcacgtttctgcaggaagtcgcggacagccgcagtgtcttggggctgcgtcgctgggagcggatcgaagttggcaggaaccggcgcggcaggtgctcgacggcccgacgtggtatcgggtcaatcagcgtgcgcgaagtccaagctgcgatgtccgaaggtgccgccctcctagcggcacgtgtgcgctaggctcgttcggggttggcgcgtggtctctcgtgtgccgcccgcgtggcggcacgtgtgcgcactccgactgctggagcgttagagcctcgacgagtggtgacgccatgtaacaacgcggagacagcgtcgggtacggggccacgacgctcagcttggcctggttcggggtctacagcaatgtcttcatccggaacgagtggcgcgagatcgcccgcgtcttcagcagcgcgaccagctggagtctcagagcgctccgcaccaaggagcgctgaaacacgaggatggcgaccgaagttgacgaagaaccgggacagcccggtcgatgcgttgacagcgttgtgagggcgaattcgaccaggggcaggaaggtgctccacgacttgaacgacgtagcgaagctgcgtagtatgtcttcaacaacacggttggcgcgctcagtttggccgtctgtctccggatgcgacgcggtggacatgcacaaccgcgtccccagcaactgaaaaaagctctcgccagaaagcagacgtaaagcgagggtcgcgatccgatacgatggaggacggaagcccgtggtggcggtacaccacgtccacgaagatcgcggtggtttgcttcgccgtgatgctggcagcaacaggagcaagatggagcatcttgctgaaccgatcaacgaagacaagcacgccagtgcgcccttgagtgtctcggggcagcccaaagacgaagtccatgctgactgacgcccatgcgtctgtggcgactgggagaggtcgaagcggagcctgcttggacggattcggcttcacgcgttggcacgtttcgcaggagcgtacccatttccgaacccacttgtacatatgcggccagtagcagtctctggacagcgacgcgaacgtcttctcgcgtccgagatggccgccgctcggcgtgtcatggaactcgtggatcagccgagctcggagatcgtcgtccagagtaacgacgatgcgcgggggatcttcacggtcgacgcggtacgtgagcaactcgccgtccagcgagtagcggtcgacgcgggagcggctgcgttgaaacagcttgcgcttcgccacggcaccagggtctcgcaggaactggatcagctccaagcaggacgcgtcctccttgtacgcgtccacgatcaagtcatgaagcggactggtcgctgcaacctcaacagcagcgacgtcttcggcagtacatacggcgcattcgtcgtcgtcctcgtcgccaactgcgtggcgacctgactgcacgtagtcaggccgacgtgataacgcgtcggcaaggatgttggtcttgcccggcttgtagtgcatgacgaagttgtactcggagaacagggacaaccagcgcgccatgcgctgggacaagtgggggctcttcgtcgctgtcctcaacgacgcgtgatcggtgtagatcgcgaaggtctgttcgccgaggagatacacgcggaacttgatgagggcgtagcgtatggccagtagccccttatcaaggaccggataattccgttccgccggcttcagctgacgcgactggtagctgatgacccgctcgcgtccttcgtcatcgaactgcatcaaggcgcatccgatcgcgtagtcgctcgcgtcgcacacaacatggaagggcttcgagtgtctggaagcatgagcacaggcgcggtggacaagctcgacttcaccgcgtcgaggcagcttggtgctcgggacgccacgaccacgtggcgtctgccttgaggagttgagatagcgggcggatcgtcgaagcgaagttcttcgagtaatggtgaagatgcgtggcgagccccagccactgccggagctgcttctggtcctgcggcgtcggccacgcgcagattgcctcgatcttctcggggtcggcgcggacaccgtccttgctgacgtagctcccgagcacagggatctcgggagcgcagaagatgcacttcttcaagttggcgtacagcttgttctccttcatcacctcgaacaccttgcgcaggtgctgtaggtggacctcaacgtccatcatgccgtcctcggcacgactgtgaatgaaggtgtcgtcgaagtagatggacgcgaagtctcggtacggccgaagcaagttggacaccatccggttgaaggtggcggggtcgttctcgagcccctgcagcatcacgagccattcccacaacatcccgctgggcgtgctgaccgctgtcagcggcacattgtcttcgcgcatcaagatctgatagaagccatccatcagatcaatggcactgtacttcgtgctgccggacaaggtgttcagcaccatgtccttcctcgggatcggcgtttgcgcaggtatggtggcctcgttgagcttgttggaggcgtggacgattctccagccgccggttgctttcttcacgcagaacgtcggactggagtgcggcgagagactctcacgaacgtggccggcttgccggcgactctcgaagaaggcgtcaatggtttagacttggtcgcgaggaagcggccactgccgcgtcacgcagtacttcgcaccgggcacgaggttaatctcgtgtcgaacaccgcggtcgggtggaagaacggctggaaccttgtccgggaaaatctccatgaactcgcgcacgagcggagcgactgggttgccggccgcttcgagcgccggcaacgactgagctgcgtagcgggcttgacgggcgttcttcggctcggctccttttgggcgcgtcctggcgtcggaagctgggtccgacgcactggttgcgacggccgcaattgactcggcgtcttcggcgacgatcatccacacctgcttgatctcgcccttcttcaggtcacggaggaagtgtttccacgagagcccaggcagccgagtgatctcggcggcgtcgcacggtggacgtgcgacttcgacgttgcgtatacgcggaggcgcctccgcgtcgtcccccaccaggactgagatcacttcagcctcagcctcaactgagtccgccgaaggcgtacgaggacggcgcgggttgcgacgtccgtgacgtcgaaccggacgtggattgttgtccgaagctgccgatgagagcccatgctcgatcacggccgctgaactggggcgccgtgacacaacgttggacgtggacgcgggtcattggacacgaccgcgtcgacttcatcagggagctcccgctcgaccacacgcgggaacccatgctcgaccgcgtgtgggaggccacgctcaaccacatcttctcgctcttcaacgttggagaggcgctgctcgtcctgacgtggctcgaccacgtcattgtccgcttccgagaaccgctgctcgtcgggacgtgggaacccatgctcgaccacgtcagacacgtcctgaggctcctgctcaggaccggcgcaggttgcgagttcgcacaccgcacacgaagggccatcgctcgcttcgtgcgcagcaagggtcatggagtcggggtccatgacggcaacatgcggccactggttaggcgttccgcacaggaacgccaatactgcattcacatcaatgtcccgggggcggactgtgccagtcagccagttgatctcaggctggtggcgagtgagccacgggatgccgaagacacagtcgaacgagccgctcagctcgatcaccaagaacttctcggaactgcggaacccgtcgaactcgtacgcgaaggtcgccgagcgccgcggcgtccgccgcggcttcccatcagcgtacttcacgatcatgtcgccaggcccgtcgcgaatggtcaagtccaccggtaacaccgacaagctctcggcgcgaacgaagttgttcgttgcgcccgactccagcagcgcgcgaagagggcgcgtcgcgccgtcaacgtggaggctaagcacaatcagcctcgtgtcaccgccggaggtggtggcaaagagttgtgcatgaagcacgggagggctaggaggaggttctgccaccagagaaccatcgctccttccacgaccagtaggacgccccgcacctactggttgtcgccgttttttgcagcggcgacgtcgttcgcgaccgtgacgttcgcctgcatcggcgccggagcgcggcaaatagccgcgcgatgtccaggtttcccacagcggtagcagcgcatcgggcggggactgtgcgttgacgaggccgttggcggccttgctgatgacgtcggcacccgacgtccaccgaactgttgaatcgcatccacctccatcggctccggctcgggcaccggagcccggaaagcctgcgacgccgccacactgtagtcttcacggagcgcaacagcgaaggcctcttcgagtgtcggtggggtcttccgggtcaggtagaagcgctggttgccagcgctcatgccggagatgaagacgtggacttgggtcgccatgtctacgggatgcgtcgtgatgcacgacacaaggtgtcgtgcgcgctggatgtacacgagcatggacatgcgtccttgcttcaacgccaggaaggcggagcgcagaacgctttcatcttggggcggctcgaacgggagccgcaagtctgccttcatcgatgccatggtcgggaagcaggaagcgtcggccacgagcttgccgagcgcccactccttcgccttccccgccagcttggacaggagaaagcgcgtgcgcgcgagatcggtagacagctgccgagcttcgatcgcgatgtccacctcgcagaaccagtggttcaggtgaaggtggccctcgccttcaccgctgtacgtggagacatcgagcttcacgatgtcggacttgttcttggtctgcgtgggagtcgacactcgctgacggaggtcagcgagttcacgcgccatgaactcctgggcggccaggccttgttgttcctcggttcccgccgtcagtagtgtcttgatcacagcgtcaccagacaccgctgcgaggcggtgtagcgcctcccactcgatcgccgacaggtgaggaaagctggcgtgctccagtacagtggcagtcgtccgggacgcgtcaggcatcgacgtgtcgttcatgttcatcacgatcttgggcgttggacggattagcgaagtgctaccaggtgtaacgggctaactacagcccgttacgtggttacacaagcagaggaagtagtaggcaaattgaactctggtattaagtgccgagacggtctcggcactcgagaccgtcccagccattaaacctatggtgggctctgattgaccaccgcgcacacacggtggcgcctgtgtgacagtggcctgtcacaaacagcacttgatccaggtcggaattggccagagcgaacactttggagttgaatccgcccacctcagtgtccgcaataccacgtagcgaaatgggcccatattcgtccaccaaagactgcaacaactttgacccgttcagcgggttaacacccatttcactttgcagataccagagctccaccggcagcgagcagttgtacgagcggagcagcctcaagttcgagtagacgctggggagtagcttcgggtacatgaccatgaggacgccgttcttgggctcgagctgcacctctccttgcgtcttcattgcagtctgctccccttcctcctcctgtcgcttggcagatatcaacaggtcgatctgaggcgcaacacgggcgaagtcagctgcttggcggcagttgaagcgcacctcctccctcatagtggagcagttgacgcgcatggcctgcacctcctcccccgtggcctcgttcttgagcaggcagtagccggaggcgccggccttgatgttcttgccgcagtcggcgtcgttgtctggctcgcgcgggccgtcggggctgcagccaccggtctaacgccacccgaggcacgagaactgggggacacccagggtggacagcccattgctgtcgaggaacgtcttcaacatcgtcttggaggacatcgagcggaggacgaactgttaagctgcgacgagttgacggagatggacccatcaccagcgataacgtcgctgcgaatcaactgaagcggctccttcattgttgttgcggctgccgttgatatcgagaccgagagacctccatgcggtgagtcggaccacagcaccagcagcagcaacccatagaggaagatggtgacggccagcccacgggccagccaccgaccggcaatgggcaagctctgctgcattatacgaacgggtacgcggcgaggggcgtgcagagcgagaagcggaatggcagatatgcggctcctgtccgcacgacatcccagttgaaccttgagtgtcacacgtcacacgtgatagcgtcggcaccattagtaccatgcttttggtacataccccgtctcaatccgcgcggatgaccagcatcggagctgttgcgctatcccgtggcagtagccggctgctccggatccgcagacaatggcatcatctccgccggcggtgtgccaacgcagacgcctgctgcgctcgctgctgctggcgggcattgtctacggggctttcgtgctgctgtggtacaatagtgaactggcggatctgactcggacccggacgtcggctatcgatggtcgaacctaccgcccgaggttcggggaagtggaggtcgtcacgaggaaacctatgcccgagcgcaagaagcagcggccgaaactcgttctgtccccccaggggcgtgtagccatccggaatagggaagaggagctcaaggcccgaacgcagtccgaccaccgaaacgagaccctgacccagatcccaattgaaaccaaagacccagcgatagcgcaggagagagaggtgaaggagaagcaggaggaggctgaaaaccacgcgaagacggtcaaaaacttcccgaggggtgagaccagaccgtgtaatttgcgctgtgttggctggaaggcgactggagactgcagtccgatcggaccccgggtcccggaaaaggaccattcgtgcatgacccgagtgccggctggcgagtctggctactgcgaagtggaaggcacggactcgggcgagagattccgagtcgggaggcgcttttgcaacagtctcagactggaggccgtcttcgctgctcagacgcggtgggttttgccaacttcccagcgcaagccactgaagcgttacacaagtggctggagtccggatttaggctgccgaatattggtgacagcacgtcggaatctcgagacggcatcgtgatggtgatttatcccaagcttatggcaagtgtctgcgctacgattcgcgtactgcgcggcttggactgtaaactgcccctgaagctctggtttgtccctagagagatgaggaaccaccctgcagacatgaagacgctgcagaaacttgctcgcgctgatggaatgggggacatttcgtttcaccaagttaatgatttccacgctacggggtttcggaaggttcacgcgatctacaacagccacttcgaccgactgctgtttctggatgctgacaatgttcccgtgcgcgatccggcatttctgttcgatctgaagagttcaaggagactggcgcagtgttttggccggatttctggcacccgtcgaactcgatcttcaatatccacagccagtcgctcatctgggagctgctcgatatcccgtttgcgaatatgttcgagcaggagagtggacaattggtggtcgataggaggaggcacgccgctagactggagctcgtgcgtcactacgcttttcaacgctcgggcattttcgacagaatgaaacttgtgcatggagacaaggacctcttccgactcgcgtggctcaagcagctctcaccatttcacaaggtccggtatccccccgccgtggcaggaaaagtgatcaatgagagcttttgcgggatgacgatggtgcagcacgacacggagggaaatgtgctcttcctgcaccggaattcaaacaacctcagtggtgtggcgagacggcgagatggcgataacatggccgaagctgtccgacgcgcgacaacaaagctagtgagcaagaatcctgagggtcgtaagacgcccaagttcaaagaggtccaggccgagttgaaagcgatcgaggcaattccaggcaaaacgatggaagcaccggagctagatgggtatcctgatccagttatttggacccacctgctttccttcaagaacacatcacgccgctcacgctacattatcgagacgtacaatggtgagccagagttctcaaaggagcaaaactgctatggccagcgtgagctgggaaaggatcccaacttctacgtacaaaagtttgcagatttggctttttcaggactggaaactgagttgcgccggtatgcaatggaggcagcgactcggcggcaacagaagctcagcaatccgtgaaccggcttcttgaaccgcattaccttcaagtacaaactgttgacaaattttaagatgaaacaaatatggtgagaaaataataatggtacatttttctgtttctcaaaagcggcatgatcccttctcaacgtgttgttgttcttgggataatgagcgaaacccctttcgggaacgtgcactgcttagtgaaacgactgctggcatggagactattcacggcaaaagcacctagggctcatgagcacttcagaattatcgtcatggtaggccagcacggacttcggggccctcgcagaactccaccaccactgcaacgatggctgacacgcttgatccttttcagcgtcggaatgtacggaattgtgctcttcaacttgcgcccgagacaacataaactctcaccttttgagcgccccatcattgctcatcaacgagcgctactaggagcgatcggccgctcttttaacggaaacgctatgcagctgcttcgtataaacattgacgacgatcctatcccttccgtaagtcagaagagaatggctactacctcgacgtccatgggtgctgcaagcgaacttctacccgaatctggcatgagtgcgggctctgaatggaaaaaggcgccgtcttctgacgcaatgcctttagactcgagtgatcccgaagccaatataagagcggaagctgaagcacacgctcgttcggtacatgtcctaccgtcaggggagactaaaacgcgctcactcaggtgcatcggatggagaaatactggcgactgcaatcccgacggcccacgagaaccgcacaaagatctgacgtgctacgacttcgtgcccaacaacgcgtcaggatactgcgaggtggaagataccaagtctggcgaacgctttcgtgttatgcggcactcatgcaacgtcctgcgtaatcgcgtgccatttcgctgcatcaatgcccccgccttcgctcgattccgcgtccaggcacaccaagcgctaccaactcccgacttccgactccccaacgttgctgtctctacgcagcctccacgtgacggaatcgttatggtggtctatccgaagctggccccgagtgcgtatgctaccattcgagcgcttcgtgacattctacactgctcgcttccaatcgaaatctggcttcgacctgacgagatggagctcgctcctgaagcactcgcccctcttcagcatctagcacagaacacgtcagtcggagatatatccttccacccgatcacggaccctgaagccaagcgctttgtggcaaaaatctacgccatctatcacagttccttcgatcgggtgctgtttctcgatgctgacaatgtgccggtacgtgatccgaggtttctgttcgactcgcgcgaattcgagcggactggtgccgtcttttggcccgacttctggcacccgagctccaccatgttcggcctccacaacaagtccctactgtgggaactgctggacatgcccttcgtcgacatgttcgagcaagagagcggtcaattggtggtggatcgacgcaggcatgcggccccactcgagctcgtaatgttttacgccacgcacaaccccaactttctggttcactaccgactggcgtggggggacaaggacttgttccggctcgcgtggctcaagctgaaagccacatttcacatgatcaagacgccaccagcgatggcgggagtggtaaccaacacctcagcattctgtggcatgacaatggtacagcacgatgcgaatggggaagtgctgttcctgcatcgcaacaagcacaagctcaccgggaccaacgacgctactatccctgacgaggaagactcggagacggaacacgaagtggactcgacttcggttgcatttgaccggagcgtgcacgatgtggaagtcggcggctatccagacccggcgatttggaggcacttgatgtctttcgaccggaattcgagccgtgatcaatacgtcatcgaggcgtttgcgactccgttggacttcactatcaagcagaaatgcttcggaaggcggtcgctgtcgaagagcctgcagttccacgttcaggagtttgcagattttccatttgatggtctcgagaccgacttgaggcattttgctaaggaagcagccgaaaaactgcgaggtcagtcctaaaatttaacataaatgacatgatttttgactttacagccgcctagggcttcggactacgcatctgtgtcgcctccattgcaaacttacgcaagtatgtctctagactcgaatagctcagatcggtaaacttttgcgcgtaaaagttagcatctcctttgagattgctgcggccaaagcaacggcgcttgtcggagaactgcggctcccagtgggcctgaatagtgaaactggaacgtgacgacgagctgcggaaggatagcaagtgcgtccacatcgcggggtcagggtagtcgtcgacgtagtttgtgtggttttggggagttgctgcaggtttttcgacggtagagtttcctgtcagcttgagctggttccgatgcagaaaaacaacttcccccttggggtcgtgttgcaccatcgtcatcccgcaaaacgactcgccgtagagctttccagctactgaaggagggaactggatcatgtgaaagggggaacccagcttcagccacacgaagcgaaagagatccttgtcgccccatgcaagaccaagtcagctgaaataatcgggtcgatgcttcgcgtagaacaccaacagttcgatgggccctgcatgccgccgtcggtcgatcagcagttggccgctttcttgctcaaacatgtcgacaaatgggagatcgagcagctcccacaccagggagtgctcgttgaggaagaagattgagtgctgcggatgccagtaatccggccaaaagaccgctccagtgctggtgaaatccggtgtgttgaagaggtaggctgggtctttgactggaacagtgtcggcgtctagaaatagcagttgctcgaatccgctgtggtatatcgcgtgaatcttggctccatatggaacagcgcgaggatctctgatctctttgaaggtgtttaatcttgagctgtcgtttgcagccaattccttcaatggctcgagtgctccaggcacgcgacgaatctcgtcggggtgaaaccagatctcaattggaaggcggcagttgaaaatgtctcgaagcgtgcgaattgtggtgtacgcgctcgcgatgagctctgggtacaccaccatgacgataccttgagtattgtcgctactgtagcggatacccaggcacagagattttgtcgatgacttgctgcgcttccgctctgaaattggcgaagcctggagcgtcgatgcagcggaatgcaacgcccggcttccctctgacacacgagcgcttcatgacacggaacacttcgtgggtctctttgtcttcgacctgatgcgccgtgagggattttgctggtgcagtctgtatcctgctcgggcttgcgctctccatcggggctgcaccctcctgttgctctccatccacgacatgccagacgccgtacgtgcgacgagttcgatggaatgtcagcagcaacttgcgacccgttggccgctgccgttggttgtgaagtaggcttgcccgagtaggtgctggagatcatcaagtcctcaaggagaatgtcctcgtgaagatgcaccttgtctgggttttgcattgtcaaggcgacacccagtccaacgtacaagaggttgcagagcagcagtagcccaagcagcagtggtctccaccgtcgctctcgctctgtcctggcggatactgcgcttgacgtggggttggcacgagtgttcatggtagagggcccgctgcttgggaatggccgtgtggaggcgactttgcgagtgcgtaaggtattccagcaatcgtcccggttccatcgctgcagcagcaaacgcacatcaccctcggcaccagcatcggcaaaccgcagttttgctatcaggatcacagccgattgagtcacacagatcaggttcttgcttccctcgaaagtgtcgacacatatgctgatgaacactgctgcgtacggaatccaggggcgttgcatcatcagatacaagcggagcagaaacacatcacttggtctagtggccatggcacacgttggtggcaaccctgttttatattgtaggttcattttgtgcggcacattctgcacgtgcagcccccccccgttgtcattgcaccagtcgagtgaatagcacttcgtactacagaaatctgttatgctggctaatgcagtgtccaagcaccacaacacaccaataaagacttgccgcttcacttcgacatgaatatcttcagcaacgactgttgcaaccaacggttgtccgttatcgaatcccatgctatcgccggcgagttctatagtacgcactaccagctccattccatcagtgcctcggctaatgccgctcgccatccagcgcagcgcgcgcttgccgctgctgatcgctcttagcatcgcgagtatcctcgcgtccaccgtctacatcaactcgagactcgtcgggaactcgtcgatcggcgtcagcgacagcttcgatgccttccgcagtagaacgtacaacctccggactcaatcggaaaactacaactacaacagcattgccaggcccttgcatccgatttcgccgttctaccagcgtggggagaatttcgactggggtgtgagtcgccagcgtggtgtcctggtctgcatgcacgacggggtgctggacatagggctgtcgctcatccgcgagctgcggtgtcttggcaaccaggagctcgttcaggtgtatcactgtgggcaggaggagctgtccaagaggtcgatggacctcatttttagactcgacaagcgcgtggagctcgtggacgtgtgctcggatctgtcgactcgaggcgtggtctcccccaagatggctacaaagttccgcagttggtggatcaaacccctcgcaatgtaccacacagacgtgcgccacgtcatgctgctggacgtggacgatatgatcatgaaggaccctgcggtgcttcgacagctcgatggctacgtggagacaggcaccacgttcttctatgaccgcgtcgtacgtaagaagaagttcctcaacgggaacgacggagggaagtattatctacggaaactgctgcggcagttcgactacgacaggttcaatttgtccgtggggctcgctccgtccgaccacgtgacaaacacgttcgctttcaaggggaagtcgtgccacgagatggattcatccatggtgctaatcgacaaggagcgagcgggccagaccgtcatggacattatgctctggttcattaccgaggagcgcttccggtttaaatattcttggggggacaaggtgcgctgcgtgttgtactggtttttttttccgtcgagtgtattatagattctaacattccgtgctgtaggagaccttctggctagcgtttgagctggcgcacgtgccgtacttcttctcgccttggggggtcagcgtggtggattcggtgcccaatgaagacatgcagcgacattctgacacgctctgcggaagtatcttacagtttgttccggtggacaacaacgagaccgaggtcctgtatgtcaacggcaaggcgcttatcgatccgtacccccagggcgtcgcgtacattcgaaaggccaagccgaacaatttattcaacatgcttccgacgcacatgacccctcgtcagcggaggagagaagtcaacctgacgacgcatccgcacgagaagttcaacattgagtgtcttgtgggcttgggagccactccactgccggactcgttctctcacaaccttttacgccgccgactgcatttccttggagttgccatggacgtcataggctcactacagacttgtgaaacgtacgaccaagaggaagaggaaatatttcgcgtttaaggaacttccttaaaggaagcccgatctaattaagtgcaagcttgcgttgcagcagttcaaatctatccgcaaacctggacatcaaagttcttgtcgaaacgacggggtccatagcaccgctgccgggccggtggaaggcgttgaaactcacgagcgccatgggtgtggcgtgtcgacggcgatcgatcacgagctggccgctcttctgctcaaacatgtccacgaacggcatgccatgtccagcaattgccacacgagcgagtcctggtcgatgtaaaacatggtgttcttcgggtgccagtagtctggccagaggacagcgccctttccacaaactcgggtgtctcgaagagaaagctcgggtctctcacgggagcgttgtcggcgtccaggaacagcacttgctctaaaaagctgttgaatatggcgtatattttggcgttgaagcggatgcctcggcctttcaatctgatttcccgaaaagtagtttgagccgcggacgagttctaagccaattcctgtagcggcgtcagtgatccgggggcctcttgcttctcgtcgggggaatactagatctcgataggtaatgggtagtgaacgacatcgcggagaacgcggatcgtggcatacgcactcacaaccaacttgggatacaccaccatcacaacgcctcgtggtgaaccatgggggccgttcgcgacatttggaagcgcaaaattcggccgttgggcctgctgcacttatagctgcgcttttgcacggaagttggcgaatccaggagcatcgtcacagcgaagtttggccccgcctttggttttcgcgcacgtccgcttcatgacacgaaaagtctcgtgcgaattgatatcttccacttcgcagtagccagagggttcctacggtattaaactgttgcagttgaggtcggcgtctggcttccgggtaccgtcggggctgcagtctcctgttgctctccaccccagacacctgaagacccgcattgccgtaggactggacggtagatccatgggcatgacttctgctgcgtcggttctgatacttggttcttcggtatgtgaacttccgtcgcttgcgtttgacctgccaaagtcgcaatcgtggaaaggtgcgttgccatgagagcgaaagaatcggagatactcgatactgccggctgatgaaatcacgagaaaccaccccaagactgtgcccagcgtcagtatgcccagcaagaggcgcatgcagcgtcgctcagacaccgcggtgacaggtaaaagcttcagtattctgttgggctgctgattcttagccattcctcggtcttgtccttgcactcttgaaaatatcacaatgacttcccttgatagcttggatctgctcgatgcagccacgactgtgagccagccgtattttgtgcagcgattttgtttgcgatagacaaatctattagtgtatctactagttaacagtcgcaaaaagtcggatgatgctcagtcttgcaaaagctctactttaaaccaagttcaggtatattttctatagatttgtgtactatctaaaatagtgaatgtagggcacactccaagagtctattcgaataaatatctgtctcggaacaaatcacagctccgcctcatgccgtaggattgtaaggattgtgaaaacacatccagcctcctaaacatatataattcgaagggatttgtccatcagttgtgtgaccatttacttcttctggaggtcgacagcatgcgcgacgctatcaaaccccaggtttttcatgataacgaattcaacacaaaccactagaacatgccgagcgggctccaggcttgaataatttcgagtgactgcactaacatttagcgaactattgtattatatatggattagaatgcgcatcactaagttcagccggagattttgcgaaatagttcatatttattccgtttttctggcatgtgctgatgcacgtcagctgcactgaaggtgactgagttagagtcgaaaatatcactgtttagaataattatgtcgaaatcttgcaataactcaagtgttcgcaacagccagaattgtccaggaaatagcactcatatctaagttgcacagtaataactcgcgaatatttcacgttttcaaccggtggtctactgttcgtccaaatctgcgcagctagcataaacctgtatctacgtgcagaaatttctgtttttgcatgaattcactataataaaggcggcgtgaccgtttagttcgaagaagaacagcgctgaggttcgacgggtcaatggtatgctactagtaacaagtgaaaatacacgtctttaagaagaaaaaatgggccttggttgcagcccaaaactgaatgtagtcatacttagctggtatcttcgacgacgagtttgaagcgacaggagatgacgttttgagctgcaagcaccacaagaatcgtaaacataggtagcgcttctgatcgactttctaggaaggaagagaagcggttttgtcgccgaccgctggatatatgtactgtacgggattatgggatacttccataccgtcaaaattccaactgtccgaccaaggtgtccaacctgtaccgttactacagcaaatcatttcaatgacatctattttattttaatgacatcctaactaaatccgttcattcattcgttcacatcggagcgcgtggagaaggcccccggcctgcagcaccgagagcaagacgggcgtcggcagcgagatggacaagtgctcggcctcgggcggggtgatggagctcgaggccagcagcatcagtagcagggcgacgcgggcgagggcgagggcggcgacgtggactatggctgggcctcgggcggggtgatggccgctgaggtcagcaacaccaggagcaggggctgcgactgcgacagtggcttggcctcgcgcggggtgacggccgccgaggccagcagcatcagtagcagggccacgacgcgggcgacggcgagggcggctacgtgggtgagcgctcggcctcgggcggggtgatggccgctgaggtcagcagcaccaggagcagtgtggcgatggcgacagtggctgggcctcgcgcggggtgatggctggcggggccagcatcagcagcaacaacaggatcagtgagtgcggctgcagcgacactgccggctggctggtattgtgcagggtgatggccccgcaagactcaaggtaaacactctatgccctgtcatcactgtgaatgtcctattctaacgttatgttttgtgcagtgcggtttataacgtagtaatgaacaagtgcaagaaaatacacgaagaggtttacccaaattatgatgttcttcatgcattcatgtgatgtcggtggtattgttccttgatcagcgagactggtgtgcggtgggtcgctttaacctttgagtttttttagtgcattttgctatgtggtacagtagcagatcaaccttgtgcgggcgtcagtcgaatgaatgatggaagtgctgaaggtggcgtcgtatcgacaatgataccatggtcaacgcgttcatggaactgggcgatgagcgcgtcgagcttaccaagcttctgcatctgacgaagagccttcaacgccgagcctgctgcaaccgcggaggagccgtgcgatttcaagaaggtgagtgcgttctgctgcgctttatcacgtagctccaggacctcgcttttgtatgcaggcgacgaagtgtcaagcgcgaaaccttcaggtaagaagagcatgagataccctgcgatgtgcctgtactcgtacaacgctgtcttctttacagaacgcgacacatacacacgaggctccgctgtaaaccactcgaaccagattgccggcaacgactgggctcccttcttcttcgggcgtgtcgtcgtagctcctattggcggtggttgctcgggagcaggaagcgtggcgtcggtgtttgctgattgagttgcggctgtgttggtaagtgcttgaaggtgtgctttaacagctgatatgcgctcgtcgagtcatttgttctgtaggattaaacatcgatctgctcggactggcgcttgatgagatcaatcaacgctggcgacggctcctcgccaccactagcagacgccttcgactcaggaggcgtcgcgaatgcctggctagttgtcacgctccacgcgagcagctcgggctcaccgatggctcgtagtgctaggaactcacgtatcttcgtgatgagcgggctgcttgggcagaacactaacatgtcggggtaatgcatgaacagggtagccgtaaggacgtcagcgacgtcgtcgtcgaggttcaaggtagcgtcagcgaaagccgtcgtactggaaaagagaagcagctgcatcttgcgagcgcggaccaagactggcgtctaccaggtccacttggaggcgcgaagccgaggaggccaagcgcacggccgccatgatggggggcgcaaaagatagtcatccgaaacctacgtatgggacgccttcaatgctattagtgtgtacagcggcgccgttaaaataaaagtcgtacattctcgcgtgttgctatctcgtaaaacttaaaacgctacctcactttaattcctactactcttaacagtcccggacatcatcgagcccccaaataccatttgagagacttctaattatccgatttacatgcggtaaagactagtttgctgctgttttcgagctctttcaagcggtcttcgcctcgtcttaatccgagcactaacggctataaaaagaagcacaacatttttttcattagacgcttctgtccggtcataaccgcctcaagaccacccaaaatagctaaattgggtgatatcagacccaaaattgaagaaacgggacatacttgtcggacaataaaatggacaagcagaacgtcaaatctgaacttgctgaaacaggaacggcgatactaaaaactgtaactcgtcttctagaagtgtgctgatgccaaactcttcttactttttttgctgtttttacctctatctgtccatgtaaaaatagtgataggtcactcaggggggctcgatggtgtccaggactgtaaattgtacgactcgttaactctacaacttgctccaagcatgagtcttacaacactagtcgtaaaacaaaactagtcgtagaaaactgcaaatcgttaaaaaaaggtcgtaaaaaaataactgtaaaaatacgacttctcaaaaatagaactggtgggattctaaatctgtagtgctattttatctttattttatacttacggagtggcacatacctacttacgttttggcaaatcgggtcaatctacttagtcagtactctcttaatgccctttgtattatccaatcagtagccctaaaacatatcctttgattcttacttcatttcactattgcatacaatgcagtagtatatatggcgcaacacgaatgtgcgaggacgatcggcgctacgtcttgttagggttacagcacactgggagggggggggggggctggaaatgggccgtggcgtggttgtcagcgtggccgcctgcgtcggcagagattgctgtggcagtgaggcagtactgcttgcgttttgatcatctcgctacatattggaccccgaaataccggtgtttgtattttgctgaaaaacccgtactaaatacaaaagcaatcaaagtagagtagttttcatggtttctagtgtgttttccctttcaaaaatgatattcagctgtcgaaaattgaaccgtagtttcggccatgacagcgcgtccctccctacccagcatctggtgcacacaccgcgacacaaagctggcttgggggagcgaaccgacgctgcttaccgggaagtggagtaacgagccacatccgtcgtcggcacgcgtgcaggcaggaatctcttcctcgccgcactaggtagaggccacactgtaaaataaattgtgctcctaaagttcgaggtcggaactaatgggtggcgctgaactgtgcgtcctccataagcgccggctgccgcagcagccactgcaaccgcccgctatccgagtgagctccataaggacgaaggcgcaaccagaacgcgcacggcgagacggcaggaagttcctgcggagaccatcgatcgacgtagcagaggcggggtccggatctcggtcttcgtcctgggcagcacttggcgggcgcgattgttttgactcggcccgcacttggaatttgtattgaaacggcacattacgacgcgacagttgccttcctcgaacagaaaagagaagagacgaaaaccactgtgcaagttgcctcggagtgaaaaccgaccgcagcactgccccctcatgcgcgtgatacgggggctgctgctctcgctggggctgctcggacgctgctccgcggcgctgcatgacgcgcaggggctgcagttcgcagacgccgccgcgctctgcgcctaccactgctctccgaccctcctctcgcccagttctcagtgctcgccgccgctttgtgggcgcgggcgcgcgctcgaagccgctgcagccaacaccagtgaccagcagatcgacgtcatctcatgtaacagcgtggagcagaatgcgtcgacgctcgcgttttcgctgacgctgtcggcggcggacagcgcgcaggtgtttcagggcctccacgacgcctttttccaggcgtacgacgccatgttgggcggcgacagcatcacggccgacgcctgccaactagctttcctacaggataaactcctgcccaaggtgcaggacgacgactcggagcaggaggagaaggcggagcgcaagccgagattagtgaaactactcacaggacaggagggagaccaagagagagcgtgcgtcgctgccgtgagaagcgtctgggcgcaagacgaggaaaatgaaacgccgctgctgactagaaggggcgacaggcttggagagaacacggtgctgttggtgcatgccaacaagtccgtggcggagcagattcgggctctggagtgcgtggatgttatgctgaacctaccggcaattctgaagttgatgcctttcgcccgaagtgccgcgcagctgagtggcaggatgatgcagagtgcaaaggggaacgtgtccgtagcggtgcccgcgatggagatacgattggttcagggggctgccctggattctgtgttgacttccctggaacagcgagcgtatgaacagtttggactgctgaacgttttcgaaactagagaaaactggccgcgatcgatttttacgaagccgctgcgggacttaaggacgtggatgaatattttagcgctggctatagtggagagttctgtcgagtggctggatgaacgccacgaacttacgcagaacctactgcgtggagaagaccaggagcgctggacgagaatgcaagcccatagacgactcgatgaatatgttccgaacctagttggtgtcgacccggctcgggaggcgggtattcgaggcaacgacgtagttgtgggaattacagatacgggactttacctttaccatgaccagttcgaccaggatgagcgcgacattttctccggtatggtgatgtcggctcgaaaagtggtgatgtacaacgcctgggcgaataaggaagacgaagccgagacaatcacctgcggtcacggtacccacgttgcaggacttctggcaggaagctcatttagcggaaagcatgccaatctgggcattgctgacaagtcgcgaatagcgttcatggacatcgggacacaaagcgaagcctgtgcaggtcagcttaactgtgctgtatccctctctacacctgcagatgccggtgatctgctcaaaagtcaaatggacgcaggcgcaaaaatattctcgttttcatggggaacgcctggatccgactacagctctcaagccagtgatttggatgcttttatcaacgaaaacccggatgtgctggtggttgtggctgcagggaacagtggcgagtcgaccatcactgggcaacgcactatttcgtctccttctggtgctaaaaacgtcatttcagtcggtgcatcgctcaactcggcatcaacattctcgcagtttggctgtcctaatattttcaacgagcgtacaatcgcagcgttctcgtcggcagggcctacgaccgatggaagactgaagcctgacgttgtggccccgggtatgagtcttatctcaagccagtccgaggcgccagggtctactaatgagagctcggccacttgctcgctgcaagggacatcgcaggccacaccagtcgtcacaggtgtcgccgtacttctgtacgaatggctccgcgatggttggtggaagagcggcaaaaaggattcagcgtacgccatgaacaatattcccgcttcgttgctcaaggcattgattattcacagtggcgactcgcttcaacagcgtatgggcgcattgccttccagtggtattgcatcgtgcacaagcctgacctcagacgtcactgacgttgaattcccggacgtctaccaaggctacgggaagcctaatcttaccaacattatctacttcagcggatcaagtggaagcagcagcagcaatggtaccgatgctctaccgtcactgtattttttgccaaactcctccgaaagcagcgagccatcagtggcccacgggggagagatgatcatctcgtttacagtggcacgaggtgttgatttgcgcgctacagtcgtgtggactgacccaccagggtccacccaggcgacgtcgcagctacagcacgatctggaccttattgtgcgtgtccgcaatggcacgcatacattcgggcccttaaccgccgactcaaggacgggaagagattccaagaacaacgttgaaatggtgctggtctcctacgcggacctactcgccgctgccggtggtaactccagtagcagtggcgacacatccgatcatgtggcgctcggcgacgacggggagattatggtggaagcggtggtctatgggcgcagtgtactgctggcagatgcgcagaagtttgcgttcgttgcatcgtccagcgccatcggctccacttccgggtcagcggctgcctcgaacggcaagtccttctggtccgagtggctggtcgccatcatcgtaggcagtgtgattattctgctcatactgattgcactctgtactcgctggtgccacgggcgaggcaagagcggccaaagcgcgaggcatttggagcagtacccagtccagactaccgtcgcaggcgccgcctatcacccggcctgcgtgaagtcgaccacgtcaaaggaagatcgatgtccgtactgcccgtttaaaagtcaagacgctgtgttgatggtcgcacacgtcgaatccgtccacgtccacgaaacgaatgagcccaacacgattgcagtgctggggggcagcaggatattcggcttggagccggcagcgcccgtcgtcgcgatgacatccagcccagcacaaaatcccgatgtaccgcccacaggagcgccgcctgctgcagacgacaagcagcagtgtccccactgccggtttgtcgcgcctgacgtcgtgatcctagtgaaccacctgcagcatatccacgggaagtaggttgaagttgccgtaccctatttgaacacgaaagttatgtgctctacagtaaactatgtggtgtacacaattcatctgcgcgggacgagcgtcccactctgccgtatgcttttcaactgccaccgaggagcattgaaagaggcagcgcgcacgatgaccgccgagctgcgtccgcgggccgcgagccacaaccgagacccactcgtacccgaggcgccgttgctgcctcgctatagaggatcgttgccaccgcgctcgccttctcaatcaccgctgcgtcgacggaagcgactgctgctgctgggcttcgtgctgtactcgtcgctcgtggtcctttggctcatccgcataaacgcgagaggcggcaacggagtgaacacgccagcaggtgacttcgtatctactgcaaacctggatgaagccaagatggagtatctacatttgcacgaggaccgcgagctgcgcaccgcgttcccgttcgcagagctggaaatggagttcctgcaccagaatttgtcggtcgagagggacgagcaggcaatcgctgaagctgaggcacacgcaaagacgctgaagacttacccagtgtcggaaagcaagatcaggagagtgcgttgcattggctggagagcaacggatgcgtgtaatccccttggacctcgggtgccgagccttgacgagccctgcaataaggtgatcccctttggctcgtcaggttactgtgaagtccaagataaagacactggagaaagcttccgcgtcatgcaccgatactgctctagtgtgcgggacacggcaagattccgctgctccgaatcctgggacttcgccgtttttccgcaaaaagctcgtgacacagcgaggaaggcacaagctcaagatttcatgctgccaaatatcgcccaaaagcctggtgaccagcaagagcctcgtgatggcatcgttatggtggtgtatcctaaattgttagcgagtgcctacgctacgattcgtgcactgcgggagctgctgggctgcgacttgcccattgagctttggtttcgatcacaggagatgaagtacttccccgaagcattcgcacaactgcaagagtggtcgagcgaagggagtggcacgatcaccttccgagaaatcgaccagcccggagtaacgggctttgctaccaaggtctttgctatttatcacagctttttcgagcgcgtgctgttcctggatgccgacaacgtgccagtgcgtgacccaaccttcctattcaattcgtctgagtttgtagaaacgggagcggtcttttggccggacttctggcatcctgggaagaccatcttcaatattcagccgcattcactcgtgtgggagctgctggacttgccgtttgtcagcatgttcgagcaggagagcggccagctacttgtcgaccgacggcggcatgctgccccgctggagctcgtgaagttttacaccttccaccgcccgaaccattttgacaagatgaagttggcgcacggtgacaaggacctcttccggtttgcgtggctcaagcttggagctccgttccacatgatcgagtcgccccctgctgtcgctggcaaagtcgtgaacgacagtttctgcggcatgaccatggtgcaatacgacgcgcagggtgacgttctctttctgcaccgcaactcgcacaaactcatgggcacgcctcggcggaaggcggtcaacatgaaggcagcagccatccgtcgcgcgcgcaacaagcggctgcgcatgaagatggcggaggccgatcgcgtcactctcaccggtgaagaagccgcacgcactgctctggacgaaaccccgtcgccgaccttggaagcgcccgagccggacggataccccgacatggcgatctggacgcacctcgtctcgctccggaactcgtcgcgtcgatcggactaccgcatcgggacgtacaacgcggacccggacttcgagaaggggcagaactgctacggacagcgctacctgaaccagagccagcactttgtcgcgcacgagttcgccaacctcagcttcggcgggctcgagatggagctgcggcgcttcgcgatggagggtgctcgcttctacgagcaggccgggattacgggacggtaggttgtgacgttggcaaccaacgtccacgacttcaacgcgtgatctgagcagagtccagcagcttagatcacagtgggcgtgcaggctgttgcccgcgcaatgctggtgcttcagagtctgaagctcggattccaccgccgcccggctcatttgaggctcagctctcgcctcgtgagcccatcagggtgttaatttgtagatcatggatgtagcgttcaagtatgacggctcagtcagtcgagacaaatatcagggaggagtcaaacgcaaagcttgtcgaggaagccacgtgcacaccgggcgcaggtcatttcgccgccagcctgtgctagacaaatcccgccgaaaaaatccctctgttctccttcgacgtgcgtcacaatctgcgagcctcccatgccacaacggaacgagtcggccagctcgcaagcgagcagaaggcaatcgtcaacgcggacggtgaacgatggagcagtcctcgctgcttcgtccgcggtccaacacggcgggcgccccggagcccgaggagcctggagcgatgctgctgccccgtcaccaagggggcgggtcaccgccgacatccacgcacgcgctgccgtcgagcggcaggtcgtggctgccacggctgctgttgctgggcggcgcagtgtacgcggtgctgatgctggcctggtcctcacacaacttgagcgcggtgcgcacgggctccgactcggcagcgtcctacgtgactgcgtctagccaagcggagccgccaacacaggagagcaacggcatggacctggcgtcaattttgaaggcggccaaccacccggaaacggacgtggagggaggggctgttgggaagcaggaccagcaggtgaatgaggagatggagaagaaagcgaaagaggaagtgaaggaggaggagaaagcaacgctgtacgtggccacgccaatacccacgcaggcggcgattgaccagcccatggaagcgtccgacatgcgagaagcgctgcgtctagcccgagagggggtagtcgcaaagatggaggccgtaagctcttccagctcggcttctaaatcgactcactcggggtctcaggtgtctgacgcggagaagcgacagcaagaagcggaggagcaagctcgcgacgtgcttctgctgcccaagggcgagacgcgcccacgcagcctcaagtgcttgggttggcgatctactggaggatgcagtccgtatggaccgcgcaagcctgaaaaggactacacatgcaccaagttcgtcccgttcggacactcgggctactgcgaagtggaagataccgagacgggcgaacgcttcagggttatgcggcgttattgcagcagctccaagtgggagacgagcttccgctgctcggatgcggcgaactttgttaatttccgctataaggcaagcgaagctgttgaggttgcgcgtgcaccaggatttacgctgcccaatgtggctgggaacgatacggaggacaaccggaccgctcgtgacggtatcgtcatggtggtgtacccgaagctgatccctagcgcctacgcaacgatcaagacgctgcgcgacgtgttcggctgccgcctgcccattgagatttggtttcgtcgagccgaaatcaatggccacccggactcaatgaagcctctgatggcgctggcagcggataatgagacgtcggtcattaccttccatgagatcaccgactggcacgcagcgggctacggcacgaaagtgtttgcgatctacaacagctacttcgagcgcatcttattcctggacgccgacaacgtacccacccgagacccgacgttcctgtttgattcgccggagttcgtggagaatggcgccgtgttttggccggacttctggcacccaggacgcaccattttcaacatccacagccagtcgctgctctgggaactgctcgacatgccgttcgtgaatatgtttgaacaggaaagcggccagctgctcatcgatcgtcggaggcacgcagaggcactagaactcgtcaagttctacactttccaccggccgagccacttcgactacatgaaactcgcccacggcgacaaggacttgttccggtttgcgtggatgaagctcggcgccccgttccacatgataaaggctgtcccagccttggccggcaagaccatcaacgacagtttctgcggcttgaccatggtgcagcatgacgcgcagggagaggtgctcttcatgcaccgcaactcgcacaaactgacgggtgaacctctgcgagctcaagttgactaccggtctcgggctatcgcgcggtcgagaaagaaggcagaaatccgtcagaggtaccggaacgagggcaaggagatcccgagctggtcggagctggacgcgctcgtccaggccgaagaaacgccagcgccaacattggagccgcccgagcccgacggatacccggactcgatggtgtggacgcacctgctgtcgttccgcaacacgacgggccaggaatactactacatcgagacgttcaacgccgacccggagttccccaagtcgcagaactgctacgggcagcgcaacgtgagcaagaacgagtacttttacgcgcaggaggtggccgacctgcccttcgccggcctcgaaacgcacttgcgtcgctttgccgcggaggccgtcgagatcaagcagtcgtaggtaggtagagagagatgttcctaacttatcgagatacatgtacatacaccggagttgtaagtctacacataacgaacgtgcatgtggcagcgctggggaaattcgtctaccgcgccttgacgacggcggtataacccagctgtgtctaacgctaggaaaaagcggcggaccgcgggtgcggtctctgcgcaatggtgcctgcctatcaccggatcagaggaaatggaccgatctccaatgcgaagtcctctgcagcacttccgctggtgaccgggccgaccacttcggctttcttcgctcgagatggaccagggcctgctccgaccgagggcagccagtcagtcggcgctgctgccgcgccacggggtggagtcagtcgtggccgcgccagcggcttctctcgctggtcggcgctactggcgactgtggttgctgagactcttgctgctgacgggggcgctctacgttgtgttgctcgtctgctggaatgccaggcagctcgaagtcctgggcctctcaagctccagcgccgcttctggtaacctgctcaccgcatcggtggatggaacgaaagccccgacaacacctccagcggcacaactgtcggctagggagatctcgattcgagctgctctagcggtggctcggcagcaggaggccgagatgcaagctaagatggcgccgacggacaagaaggacaagaagaaagtggacgcccgtttgagatgtcggggctggaaggccacgagcgactgcaaccccgacggcgagcgactgccggagctggatttgccctgcggcaaaccggtgcccgtcgatcagtccgggtactgcgaactcgaggacaaagacacgggtgaagtcttccaggtggtgaagcgcgcctgcaacagcgtgagagaggacgcgaggttccgctgcctcgacgccgccgagtttgtcaagttccccatcagagcgaaggaggtggcgaagaaagcgctagcccctggttacgcactgccgcacgtggtgcccgaggttcctggtgtgaactcgaaccaatccagaggccaagatggaattgtcatggttgtatatccaaggctactagcgagcgcctacgctactgtgcgagctctacgagacgtgatgggctgccagctgccgattgagctctggtaccgtcctgacgaaatgagatctgtgcgcaaaggtttggtgccgctgaagaagctggccgagtcggttgggggcatcgcgtttcacgagatcaacgacgctcgagcattcggctacggggcgaaagtgtacgccatttaccacagtttcttcgagcgggtgttgttccttgacgccgacaatgttcctgtacgggacccgagcttcctgttccagtctgccgagttcttggagaccggcgctgtcttctggccagacttttggcaccctgacaacaccatcttcaacatccaccgccagtccctcgtgtggcaattcctcgacctcccgttccaggacatgttcgagcaggaaagtggccagctcctcatcgaccgacggcgccacactgcgcccatggaagtgctctcgttctacgccttccaccgcccaaatctcttcgacaacttcaaactcgcgcacggcgacaaggaccttttccgcttcgcgtggatgcaccagaacgcgtcgttccacatgatgcaagcgccgcctgcagtcgctggcaaagtggtcgacggcaacttctgcggtatgacgatggtgcagcacgacgttcagggcgaggttctctttttgcatcggaactcgcacaagctcacgggtgtgcggacacaagaagtcgagggcgttcgtgctgaagctctagctaaagcacaggagaagctcgcggctgtgacggccaagacgggccacagtcgaatgactcccaagtggagtgaagtagaggccgagattgcagcgacgacacaggcatccacgctggaagcacccgagtccgacgaatacccggacgagatgatctggacgcacttgctgtccttcaatagcaccgccgaacgcgcagactacgtgatcgaggcgtataatgcggacccacagttcccgaaagagcagcactgctacgggcagcgccacatcggctcgaacccgaacttccacgccagagagatcgctagtctgagcttcgctggactggaagctgacttgcgtcggtttgccaaggaggcagcagagcaggcggctcagaatgctcgagcgtagtagagaacacagagttcacagactgcagcctgtagacataaattatgacgacgttaacatcttgatcccatgcgattatccgacgctgtatgacacagcatcgccacgtgaaggtgtccgctatctcgcctgtgacgaccggcgcaagtgaatggatcgcaaagctcccatgattagccggaatcatgcggattccccaagtatccttgtgcctgagaagggggtcttgtggacatggcgatggtatctcgccgacgcggcatcagctcaagctgaatcaccaaacttgaacgtgcccggcatgacgcaggacgagacggaccgcctactacggcctcgcgtagcaagccacgctgctgcgattccagcggtagtaagcagcgactcgcgccagccagccacctcttcggtacctgcacctgcatcgtcggcaccgagaagaagaagattcctgaagtgtttgctggtcgatgcagcgctttatgcctcattcttggtgtgctggtcggcaagccacgcggggcttctgaatggctccgatggatcgcgtgctgctagcaccctccgctctgcgatgcgcgctgccgttcgcgaagcgaaggagttgcagctgatgcgcatggaatttctgttgacagcgacgggaagcctagaggaggacgaagcgggagatgaggtagcgagccttgctctgcctgtgcatgaagagcgacccaaggtccaggtggagggggggggggcacatggaaggcttcgacgaagcgaaggagttgcagctgatgcgcatggaatttctgttgacagcgacgggaagcctagaggaggacgaagcgggagatgaggtagcgagccttgctctgcctgtgcatgaagagcgacccaaggtccaggtggagggggggggggcacatggaaggcttcgatccaagaggccgaagagcacgcgcgctcagtgaagatgttgccagcgaacgagagcaagaagcgccgattgaaatgcgtcggctggcgcgccaccagcctttgcactccacacgggccccgtgaaccaaagaatgacaaggactgctataaagtcatccccaactcgttgtctggctactgcgaggtggaggatcaagatacgggtgagctcttccgcgtgatgaagcgctactgcgcgagtttgcggtacgatgcaactttccggtgtagtgaggctccgaatctggtcaactaccagttggagtctctcgaggccgccgagaaggcacttgtgccaggttttgctcttccaaatgttgttgaatcaaccacccagccgcgcgacgggatcgtcatggtggtgtatcccaggctgattcccagtgcctacgctactattcgagcgcttcgggcggtgttgggatgccagcttccgatcgaaatctggtaccgagaggccgagattcgtggtggccccgaagcccttgcaccgctactggagttggcgaatacaagtggcgctggaggcggtatctcttttcacaagatcactgaccactgggccacagggtttggagccaaagtattcgccgtctacaacagcttcttcgagcgagtgctgttcctcgatgcggataacgtccctgcgcgtgatccaacctacatgttcgaatcacaagagtttgtggacactggggcagtcttctggccggacttctggcatccaggccacacgatcttcaatatccacggccaatcgctcctctgggaagtactggggacgacgtttgtgaactcttttgagcaagaaagtgggcagcttctcattgaccgcaaacggcacgctgctccgctagagctggtgaagttttacacctttcggcgcccaaatccttttacgcgactcaagcttgcctacggggataaggacttgttccgattcgcctggatgaagctcgatatcccgttcacaatgattcagacgccccctgccgtggcaggcaaggtcaccaatgggtccttttgtggaatgactatagtgcagcacgatccgaggggcgatgtgttgttcttgcaccgcaattccaacaagcttacggggcaggtgaagcgcgaggttatttactaccgaccgcaggccatcaaaaacgtccgcgagaagctgctgaaggaaggcatcgaccgcgttcccgatcaacaagcagtagacgaagagattgcaaggcttcgctcgacgccagcacctacgatggaacctcccgaacccgacggactgccagatcctgctatgtggacgcacctgttgtcattcaacactacttcgcagcgaggcttctacaaaatccagccctacagagctactccgcagttcccggattggcaacgctgctacggtcagcgagagttaagcaagaaccggcatttctacactcaagaatttgcaaacctgccatttcctgagttagagatgcatattcgcaagtttgctcacgaagcagagcagatccgtcaacgcaaagtacaaaacccgaactaggtagcatcaatgcacatgtacaaatacccattacttaagtagctgcgttcgggtacggtttccaaagggctcacaccctgatattcattccggcaggagaggtgaccagcgtgatactctgcgggtggttatggtgtagcactctgctaatggaaatgtaatagtgcgactcacacgagctgcttcgacaccaaggtacacttcagccttgcatcagtagtaaaaccttctttacggccttcttgaagcactaatcctacgcagacgcctcttcttcacttactacgcgttttcctctttttccgtcggttgttgctgccgccgctgcggcggtggatcgtgcccctttcgcgttgcttcgtgatttctccgttccagcgtttggcccgtgtcaaaatcagcaaatacgccggtattgatagcatgacgagtgctccaggaatcattggtgcggccgcagcaacgttttccgctacaagtgacatcgcagcccctccgaagtctcccgagctactgtccgcctgggcatcgcggtcctccttctcgatggtctgcagctcgcacatttggcgccattcgcgcgtcttcttaaactcctcgtagctctcatcgatggagtcctcgctctcaggtgggaacaccgccagcgcgtccgtgagtcggccgacaaacgcctgcggtgtgaactcctccagcgttccctcggctcgcgtccactgctgcatgaggaactcgcgccatttgctggtcgagcccggcccgctttcgcctccgtccaggggcgacagactggccgtgaccttgtagaggaagaggaagacggagttggcgcagtcgtacacgcggctggctttgccctccacgtagtgctggaactgcgcgcgcttgccgttcaaagggtcaaggaacacgtccagcacgggcaacgcggagtcgtccagcgcctgcacgttgtccagcacgaagaggctgcgctcggggcaggcgcgcagcggcccggtcaacgcggagcgcagcgtctgcttgatgtcgtagttggaggctcgcgctggctccagcagcgcccggaagtccacgcgctgcaccgtgtggggcgagcgagaggtgccgaagagcgaggagcccacggcgcctgctagtgcgtgcagcagatcgctggagttggagaagagcacgagcgccagcggctggcgccggtcgaagtcgttggcgacgaagcgctcggtcagcgtcgagagcgcggaagaagagacgcaggcgccgaggcacttgggcacgcgcgtctccaggcgggaaagcagatcgtcctgcgcgaagtgtgcgcactgctgcgccgaggcgagcggcagcaacagcagcaacagcgagaggaggcgcagcagcaccatggccgaggtagataatgcgcagtatcgcttgttcgtttcaagtcgcagctaactgccagatggtgatcgtacttagtggagggcagcatgcttgataacagcaccaagtcttgcgtagcgctgggagggggctaaggcttactggatgagactatcagactatcactagttgcagagaaaccaggaacatggcggcaagcaggatcaacgccgcaacccggcgtcttgattggcatcaagtcgagaactctctgcatcctcccggtggcggcgaaggcactccgttcgagctgtgtgctgcaactctggccaactggaggagctacctggagtcggaatactcaaacctatcgcctcggcggcgatgtcgactggcggaaaaatccttatcgtcgagcttaagtgccccttacatggagcccttcttgaagatatcaatgctcacatccagaacgcgacaggaaacgggaaaaatcatcttctctgctacggggtgctgcaggctgcaggccagctcgggctcctgaactcagatatatgtttcggtccaagtcaccgcgctatcggagcagtcagaccatcacgtttctattgggactttcacacactgaaattggaagttggtgtttttcaaggctgggggtatgcggatgacggacacagcttagagttatatggcagacgtgtggtgacagtatcccggagtacgatgtgttctctgtgttcgcctgacgttcgtgggtatcgcttggactcggttctgagtggtgcatttgaaagtccgcgtatggatgtcacaacaagcactacgtgttctaccgtgcaatttgacgcctaccgtttgctggggctttgtcgaggagcaagcctacctgccggttttcatggcccggtggttttcgatctgtttaacgcagtggagagcgcacgcaaccggcgatgccgtcttgatacctcattcaccggcggggggaatacttgcttcgaatacaaaccgttgcttttgttgagctttgtgggttttggaagcagtgggcatatacatgtagtcctggttcattcgaccttggaatttgcaagtactgccatgcatagcgaacaatgggcactttgatttagtaaataacgtctagaacattttctatggttggtggcccgtagtttgacgtgggtggggtctactgcacgaccatccggccttgcgcctgtgccatcaggagagcgccttcgtgcgcatagtcgatcagctcctgctctaaattggcgaaaggcaagtcttcgaacttggtcaagttgtagttgccgatgacgttggcctctgcgccgtagcacgactcgaattctttaaagagcgcaccgctgggctgaataccgatctggtactttttcttgatgtcctcgtagctcatcatacgctgcaccgccgtccgattggctgggaacataatttcctcgccatcaccaaccgagacttcttgctcccatttgaacgactggagatgcgtccagtacttcgggtccatcttgtccaccttgccatcaagctttttggcattgcgatgcagaaacagcacgttgccatcgacgtcgaactgaaccatggtcataccgcagaactgcttcttgtatgtcccacgctccacgcctgcagccgcaggtgggaacggcatcatgtagtaaggtgtatgagtcttcatccacgcgaggcggaagagatccttgtcgccatgggccaacaccagccgctcaaagtggctcgggcggtggtatgcatagaacatcaacacttcgagtgcgagagcggctcgctttcggttgatgagaacctggccgctctcctgctcgaacatgtccacgaagggcaaatccacaagctcccagagcagcgactcgcgctggatgttgaagatcgtcttctcgggatgccagaagtcgggccagaagatagcgccgtgctcaaggaactcgttgctctcgaacaggaacgtcgggtcgcgcacaggaacattgtcggcgtcgagaaacagtacgttttcgaacttgctgtgctgaactgcgtgaatcttggtagagaacccggcgattgtcgggtcgatgatggtttccacagtgacatttgcaaaccgctgctgcagcatttccagggttggccgcatgctgggagtgcgcaccacctccggctgcgagatccacagctcgatagggagcgtgcagttgtaagaccgtagcacgctgatcgatgcgaacacactcgacagcagcttcgggtacacaaccatgacaatgccgttgccagtgccgttgttgcccagcagcttggccggattcgactcgttctgcgccaaagcattttcgtagacgccctgggccatgaggccgaaattcgcaaagtcagcggcctccgcgcacgaaaacacgacgtggtcgcgcacactggagcagttgagctgcatgacgcggaacaactcgccggtgtcctcgtccagcacctcgcagtacccagacacacctccctgcgcaatctgattgcatgcaaggtctgcatttggctcgcgcttgccgtatgggtcgcactgtccggtttggcgccagcccatgcatttcagcctgtttcggatctttctcggctggtgcttgcgaatatccagagtgctggctgcgcgcttgtcctccaggcgatccttttcctcggcaataagtttatccgttgcaccgatcagcagcttcaaccgctcggtctcctccttagcctcgttcttcagaccttcgagtcgatcaacctcgtgctggtagccctccaccgaccaagtatcgcgatccgctgcgttgtttcgcagtccagccaccaacgcagcttgctctccaggaagatccttgccgacagggaacacgtggaagtacgggttcggaggcttcgtctcaggaagatgcaccaggtacatggcctgcaggaattcgtgcgagcgacgcaccggcggtcgggtcacggcgttcatgggtgtcgccaacgggccaggcgtttcggcagcctcgtccttgctggagtccgcgacctcccactcctcttgcggggcttgcatctccgcctccgcctggttcgggttcttcacctcgtcgccttcttgactcgaagccttcgtttcacttggttcaggggtgggttgctcctgcctcgtctcatcttcgttcgcagcaaccagcaccacgtcattctgccgcgtggggatctcgacgttcttctccgcaagaatctgcacctccggagtgctcggactcgtggtagcaggggtcgtcgtagtcggactaggcgtagcagtcgccaattcactgagcgcaggagtagtcacttccgctgcagcgttctcatcctcggccgcaccttcctgctgctgtggctcctgctgctgttcttgctgctgctccagctctcgctgcatctccctctcctccgtctcgcccccgttcagctcctgcgcgggccagccttcctccggctcgttggagtccgtcgtccccaccttgacgggcgcggcgtccaccaccgtccgctgctgttgcagcaggacttgctgttgctgctgcggagccggaggttgcggcgcccagcccacgacgaaggagccgagcaccgtaagcgcgtagaatcccagcaccacgtagaacagcagccaccagcgcgtgtgtcgcccggcgggtgcagcagccgccgctgtggacggcgcaaagttcgcggcgcggcgaccatcgagcgcgtaggacggaagagcggagcggcgcatggggcctggcagatcaaatggcgcactggcctacgtggcctgggctaaccctgcaggcacgcgatatgagcagcaagtgtgctgtgcttgccccatcgcgggactgcgagagaggaacgtctccgggagacttgatactgcagtttggccaaacaactagacacttgtatgcaacgaaacctgctgatactgaagccctgccaaagatcttcatgataagcacctagccctaatctgcagttacggctgcttcggatttgagtttttcagatggacacaagcattgtccgatcgcgttgctcggctcaagtcgctgtcgtgggtgggtgggcgctacagtacctctacgaacagtaggaactcgcagtccgcaaactgcttggataggctggcaggcgttgttccaatctccgttgtgtacggacgactcgggcgcagtttaaccaaagctgctccaagcgatcgacagtcgcctccgatgtgtgcttcgcgctgggcatcatctggcaagcacacatgctgagaccttcaaaccgatccggcgctaaaccagcggggcttccctgaaatcagcggagttgcctcctgccagcaccgcactgactcagttgtgtccaatgtatctaaagtttgtccagttaaatatccgaaatgtgctcggtcatctgcgcgggtgtctctgagggctgcgtcgtctcaacaagctgttcctcttgctgtccgtctaccgccccgtgctggccatcggcggccgtaagctcctgctgtccgcctgcagtgtcgtgctgaccatcgatcgccgcgcgctgtccgtcgatctcctctcgctggtgctcctgtccgccggttcgtgaagactgctctcgtccatcgactgcagcaggttgatcacccggcttccgatctagattagcttgctgcttggggagcctctgctggtcgtccgcattaatctgggcatcctgttgcttactacgcgcaggacttgcagcaggcaccgcagcgaccggtagtaccgggtcgacagctactgccggctcaattgcctctttttctggttgtcgaagagcagcagtgggttgaggatcgtccatgtcagagtgcttcgtcggagttggagtggcgatcgtctcttgctgccccactccttgagccttgagattaatatcttggcttggctctacgcgtatagtcgacggagttgctgctcggtcttctggatgatccattgtattaataatgacttcctgatgagaaggttgttcgctttggtgagcagcgacatcttctccttgatcgtcaggatggacttcgtctcccggggcgttatctggatgcatgtgctcatcctgaagctgtgtctcctcctccgtctctgtgtctggctgctccagtggctccgtcgcttgtgcctcctctgtttctgcagtcgcggcgacttcatccgcaggcgactgggtttccagctccggcaactccgttggcgggtcgtcctgctcctgttcttgctgttgctgctgctgttcctccacgggtgcaacagacgccaacacgggggccggcgacgcgtccgccctcttggcgtcaacagccctgccgacgcgcacgtggcctctgccacgcggcctcagcgagtacacgaagaagttctggctgctctgctcggagcccaccactcggccgatgctggcgatgtcgtccgcgaagtagatggcgccaaagtacagtagcacgcacagcaagaagcacacgcgcagctgcagcgagctgatcttgcgcgagcggtcgcccgccgcgtagcgcttggcgtacacccgctgcgcgcgagggtgcgcctcatgcagcgagtagcccgcgctcgaggtcgggatgcgtacgtactgcgcgtccgccacgccacgctgcttgcggtggagcgccatgtcgccgagtagcggataggaactgaaccgttcagctggatttcaacctgcgatggggaatgcaatcctgccgtatgtcatgctgttgtcctctcgctgtccgaatcagatgtcaacccacttcaaccactttcctcgagtttaccaacgtagcaaacgccgcatgaaggtggacacacgcatgttttctaataaccatttagtttggacagctccgatcttcttacttactggccgcccaccgtaggcgccactgtcccgacgttcggagtggtcgcgttgttcgctgctgccgatccctgcagccagcttgagagcacgtcgcccagcacggcgccgtccacactcttggcagtcgcgtagccctccgacttgagccacacgtgctgctcgctgtcgatgttgaaccgcgtcacactcgtcagcttcgcgtgcgagtcgattatctgcgtcaggttgccgtagaactcgcccgcgtccagcagcgtcgtgaacgggtagcctgcgatgcccagtcgcgccagctcgtaaaacttgcgctgtgtggcgtctccggtgctgtcgatgaacaaccactcgctcttgggggcctcttggatcagcgcatcgaccatttccgtggccgtggccgttttcgccttgcatttctccgccagtggcgcagggaagctgaggtccacgtcgcagccaccgtagtagttgacaagcgagcttgcggtcgtcttgtgctcagggaacacaccaacgtagctgtcggccagcacctgaaactttgtccccttttgctcgacctcccacattttggcgaccttggccgaccaaagctgcgcaccgagtgatccggcgctgtagccaccgagaactagctgctccgggttgggaaagttctcaagagcccagtccagcacggccttggcattgttgtagccgttgaggtgcatgctgcggttctgtccgaggcactgcttgttgccgagagcttggttgtacgggctttcggaggcctcgatttccgtgttgccgacgaaaaggtcgcccgtgcagtacgggaggaagacaatgttccagtcgttgaaaggattaccagcagagccgcgagccatgatgccgctgttgtcaaccctcgcgttcggcttgacaagagggctggcaccgagctggcactgcagcgcaaagttgcatgtgaacttgtcgacgcaggcgccgccaccctggaagtagagaagaaccttggacttgtccttcttctcgttagggaatacctggaagaagtacgtggagatcgactcaaacgtcgtcgtgttgtccttgtattcatcgaaggcgcagcgagtgtctcctccggggtaaatgagggcgctgccatcgcttgtggacacagttagcgagtcgatcccgcagttttccgaggggccgaacgtgcagctgttatcgtcggcagcgctgacaaccaacgcggggagagccaacagcgtcgccaggagtctggggaggaacatgcttgtcaacgcgtgtccaggtgatttcgagaatgaactggtgcgctgtcggcaatgagggcagctacaaacgcaagcaatgcgcgctttaccaagctgttcctgggcacctaggcaagatttcgtcgaagatggggaaatcggctcctctttgctggctctggtttcaccgaacaagcgaaaacattactgcagcagatagtgcacctgtctcttttggacgacgcggatgttgctgccagggggcatgaaggcccgagcaggggttcataccagcgcgagtttagctggtatcgggtatctcggccttctgacgaagctgatatcagcgatactgatactattttccaggttcgactcccctaaataggggagtcgaacctggaaaaaaaagtaagccaagggattcccaatatctgagcaagaaaatgaccaaaagataagcaaacctgagcgatacgggggtagtcagaaattgctcaataaatgtgagatcgcacttagagagatacgatggccccttcccggcgaaggccacgtcagagtaccgtcgccagcagacgtggtcgcgccactgccgagttggaagctgcggcgtcgtcaatccgtgaaataccttggccacagcgtaactcgtccatttgataccttcatcgttgctcttgctctcttcagtatcactgccctcaagcggacctccaccgccaagacggagttgaatgagtgagcgtgtatcccgctcgatagcctcgatcagagactcggtcagcggccgcagcattttctgcagcaaacgctcatcctcgtcaccttcgacgtcgtctccaccggctgcagcatcatccttatcgtcgtcgtcttcgaagtaacgtaccagtttggtctcgagagcatgggccttattatccagatcttcttcgtcttcctcatcttcgccatcacgcgcggttgacgtcggagaaggcgccggtagagctgccgcgtacagcgctccatacaaatgagcgagacgagcaagctggcgcgactcgagatgctcgtgcttcgcgtacaacagcttcgtccatcggtccacgacttcactcttcatctcgtcagtcagttcagtcctccagctcaactgcagctggaatgcgggctgtgacagcgaaaagcgctggatctgaccagtctgttgagccgctcgcaattcttgaagcagccgacgctcattcgtggcggcagcgaccgcagcagcattggtttcacccgcctgctgagcgtcggaagctgctaacagggctgcagcttggtctccattgctgttggcaccagtcgtccgtccgtaccattgagctacttcgtgcaggtggcagtcgataacccaagagctcagatacccgtccttacgatgtgtcacgcgtgcattaggcaattccttgcgctgcaccgctccgagcagtgacttaactgtagattgcggtcccagtttcttcgcttgagtgtccagcagctgcagtgtacattgactcatgctcagaggttggagtgtcacgcgtaaacccagctcgtcgtccttctgacgctgcgtctcgagggccagcaacgtgaggaacgtctcgatcgaagccgccttcaggtcaaggtggcgctccagccaatctcgctcgagagactccagcgtcaggtcactgccagctctctgacctcttcccgagcacttcacagccactacatgcttcttgctcgctggggataagctctcccgactctggaagacaagagccatgagcctccgaagctggtcgcgatgtaatgcggttgaaaacagtaacgagcggaagtgcaccgcgtcttcattcagcagatacagcaacgctcgcgcagacttgccgtcacgaccagctcgtccaatctgctgcacgtatccctcgacagacgacggcatgtggaagtgcacaacagcccgcacattcttcttgtcaatgcccataccaaatgcgatagtagccaccacaacgcgcactctgcctcgcgcaaaacctgtgcggaccttttccttcgcctcaggcgccatgccagcatgaaacgccaccacctttccagcagtgcgccaagcgttgggcaattgttcacgcagcagagctgcaagttcctccgtctgccgttgctggtgaacgtacacgataacaccaccgccagccttggaggactgtgatgatcctttgctcaactcggggaggatgtggatgagatgccgcagtcgctcatcattcgaccggacggaacgaacttccagcgccagattcttcctttgccatggcatctgcagcaccatgtcgctctcgctttcgccaccttgattctgaagctgccgacgtgagcgcaattgatgcaatacatcgtggacaacacgtcgcgaggctgtggcagtcacacacaaaacgcactgggcgtggcggaagacctctgccagccgcaagtagcttggacggaagtggtgggaccactctgagacgcaatgcgcttcgtcgacacacactagcgccaagcgcgcacggacccgcggcaacgcgagcagcgcttgcattccagcacccagcgccttctccggcgacaggaagatcagagagagtttgtccaccagcagatcacgcacaaaagccgcatgcttcgccttggacgagcctgaatccgagccggagccggaaagacacacggagcgagccttcaatggggcggggagactctcgtactggtcgttcatcagcgaaataagcggcgagatcacgagcgtaattccaggcaagaagagcgctgggaattgatagcacagcgacttgcctgcacccgtgggcaacacaaggagagtgtccttacgacgcagcacccttgagatcgcccactgctggccaggacgaaagtcagcgtgcccaaacaccaggcgcagattggtgagcattgcctctcgctgctcctctgcagtagcttcgatatccagaggaacgcactcagtggcctccgcttctgctgcggattcagcaacaccgccagaggaagaagaagccgtgaagagtgtctgcagtgcaagcgggacgtggtcgtcttcccagaggaagaagtcgcagcgaccttcatcgaatcccagcgggcaggcgaagaacttgcggccgtggttcttgttcttcttcttgacctccaagctctgacagaccaacgcatgatgacacctcggcggtgtcaatggctcggcctccttcttcggtttcgatttttcttgactagagagaccacgcgctttctcggctttggccagcgcttccagacactcctcggtgaagtccacgccgtcgtcagccagcatcgacttctccttcttactctgttgagtaccgttcgcattgaccaccggagcgaggcctgaagatttctcacctgtagcttcgtccagcaggttctcattacgtgcgcgcagatacgccggtcgcttcttggcgcgcccagagctgcccttgaatctcttacgcatgttcagcttgacgaagttgtcgctcaccgcactttgggcgtcctcggccttccagcgctcaaactccgcagccttccgagcatcacccacagcaccggaacccgcgtcgttgctgtcagatggagcgtcgaagtcatcgagagtgaacccactgttcccagccgtcgcgaagccccacgcctcctcttctttctcgtcatcactcggagcagccttacgtttgcccgacaccttcgtcacctccttgtctttatctgtctctgcatcaaccaccgacagccctaaagacgacgcattggcgcctgtatctccactggataaaacactgttgagctcctcctcgtcgcctcctttcttgtccttctgctgctccccgaagacctcctggaagacacgatcaaagcccgtctcttgacgttctctctcctgctgcttggcccgttccgctgcttcatcttcaggcttcttagctgctccactgcgccacaattgctggcgctcctgtacagacatggagaggcctagtggacctccttttcgctcatttttcggcttcggctgcgtctttttcgccgctttttcgggctctgagggcttagtgaccttcttgcttgcatcaggcttgactttcttctttttcttcttgtctagagcccgtagtagccacgcagcgtcgtctgtgccggagctagaggtcttttgagctttgacagtggggtttggggccttcccggcgctcctacgaggcgcaaatagaggtgcagatgtgcctgaagacgcagaagatggtggtgctcgagaggacaatggacgatctgctggagctgaggttgcagcgcttgaagccccaccaggagctgcctgcgccggctgccggcgcggccacattttcgttcgaaatggtccaaaaatggtggcgccaacacctgcgattggtcgaaaacattaacgtaacgcgtagcggcgccatcgttgtatattagtaactttatatttattaggatgaaaagcaaattgaaattgaagtcgtttaaccgcaataggatcttacgtgtggtgcagtcagtccacagcaggtgccatatcctcgtgctctctccacttcttctctatctctttgcgcttccactccatgcagtcgcaaaacaccttcttgttctgtacgtagatggatgttcgcatctccaagccatcatccgacacagcaaagccttctttcaaacgcagcgagagaagtcttgcgaatccagcattccacgcgcgcacaaccaaatcgacctatggcatcgtaaataatgttagaacaagtagtattcagcacgtactcaaactactcgtaccttgtatctgttgccgattacaaatccttcagatgtggactcgacggaaatttttatcgtcggcaccgcatacgaccgagcatcaaaccactcgtgcatttctgcagaaagagcaagacgattgcttgggtcgttgtcatacttcttgtagcttggatacttcaggcaatgctctctggacatcacatggcagctctgtgccttccccaccgacccgaaccactcttcactctcgatacgctggtacttaaattcgtcagtcgctacgtcaacgatcgaggtgttggacgagaaagtcgtcattgagacttgaggggactcggtatcatctggaacataatgcatggcaaagatgcgtcgcagttcgcttaactcccgagaaactggggccacagtcgtcgagatcgtgtggccatcgagtggggaagtttgcttgataccttcggtctgcagttcgttttcaaatagcaaagcatccctctctgtacaacatctgtgagacatcaaccagcacagttctacaataaccaaaatgcataccttctttgaaaagaacatggatccgcaacatcacctcatcataccacagcgccttgtcggtttcgccagcacgaaggttgggatcgtagtatccaaggtatgaccccgccagtcggtacagcctgcagcgaatccctttcgtgttcagcgcgttgccaacggatccagtgacaagccacaattcagtttgtgcgtgttcttgctccggaagcatcaccagcacgtgaatcgttccgtcggagactgtgggaaacctctcgcagatcttgtccgttggatcgtccaattcctccttcatgtagtgactctcaacttcatcgggcatctcccccttccgcatccggagcagatccttcgacctcagccacgcgccgccctccgtcttcgccaggaagagcttcaggtcctttgccgggatggtaatgtcctcactctccgccttgatcgccttcttcaagtctccaaccgactggcccccatcgatgtccacagggaacgcgcttcccgccgcaccaacgatcgcacagaacagcttcaccatcttttctcgaggcggccgattctggaatgaggaaagggagggagggaattcgctacctagacccacacgggctttcagccaatcacaataatggtgtcgtagaaatggcggtgagggtgaactatccattgcggtaagaaaacctgggcatgattttctttcgaatgaactggggtgcgggtctctaagcggaggcaaacgccccgaacaattttgcgttttttacggctaggacacactgcgcctcagcagatatctgctgtctgcacttgttattgttattaccattatcaccactattttggtgagtactatgcctgtaacgcttcatatgactgcactagatattttaattctcatactagagatgctataagagcatatccggcggttggtctcaaacacggttataattgatgttgacaacatcatcatgttgctattggtattgattgcaactgccactgtcgccgccactgccagctactgcggctgctactgtcactgctactggacactgccactgtcactaccgctgctactgctactgctaccccattactacttctattgctatactactgaaattccactattgttaaagaaattgcttttgatattgctaactgtggcgggcgttactactggtcactgttactaagtactgtttatccctactgcaactaaaactactatttcactattgttaatgatatcatagtaatgctgtcattgaagttgcaagttcatatctcctgctatcgctactgcgactgtttattatctgctgccactgctggcactgccgttaccgctgttatttgcgctacaactacgatatcagctatgataatgacatttcaatgatatttcccctgctttcttcttcacgccggagaaagactgccaaaatccacttcatgtttctattatatattgctgcataatatcactggccatctcatggctggcgcaagctaaatttacaagtagatgccgtctgaacatcgccgtccccacaagcattaccgatgatcttaacttcttatcggtcgtctaggctttgtatatcactctctttttttctaaatagtatatgtgacttgcattgctgcgtaagtaatatcaatacgaagtattaatatttcttattcagtaaaatgctattggaattgttcgcctgcgtcaagatcactgcccgctaccactgcaactgccctactgtcaatgccaccgctactgcaaccgctattaaataatagctttgctactgatgttgttatcgctatttctgttattaacttttttctgctcgccccacgaccaggaagaaaaactgtcaaggtctactccatggtgcgtgagttgttgcaactcagtatgatgtcatccaacgagactttttcgcgaaccgcacctgttaagatatctctatttacgaacgagcagtttacacgtcaccgcagttatgaagctaatttcgctttgttatgcgttcatattgctctagttaggttcttgctgcagcaaacatcacgcccatctaatcgggcacatttagggttaaagtgcaccacaatggccacgaaggtggcttgtccgtctatcaatgaatgtttcttctgtacctattgcagctcaatatgatgcgacgtccagaacactacatacactactgtcgcgccgtgcgcaccccgtttagccaacgtcgcacagcgccgaagttcgcacagtatgttgcgtgtgaattaaaccgcgcattttttgcttaagttttattccaaccccgttaaaatcatcgatcgcgcttcgctgctttataccggtaataccatgatattttggatactctagttcatattaaaaagtaccgaatgtattaaactgatggtctgactaaaaatgatgctggctctaagctatccccctccacgacaaaaagatatggacaccaccaaaagtggctgtaactttgtcattttttatcgttttaaggtgcggtttggactagagttgcagaacacgctgataaagatctgcacgcgcgcttttgcgcttcatcaggtagctcacatacaaatcactggttctgcccaggtgacaaaacttatggacagctgatccaggtagagtggagaaatcatgggttgctttgtctccccatacaaagtccaagttcgtatcatttgtaaggggttttggttaatataggattttgtatggggattaggtggcgaatccgagagggcgaagcaggaagggctacggctcgggcgcgctagagcagtatccacagcgcaaacacccgcagtagcgtgcgcgccctcgatggtattatcggaggtggtgttggcggccgctagggagagcctagcgaagtaagcacgcgacagcagaacatacgcaacactcatgctgcgggtctcgtatagctagctttcatgccctcgcagacagcttggagagcgctccactgtctacgagtcgacacctaatgcgcacacacctacggacagaccttgcatgttcatgcccgcggccgcctgcggctatggcgtcgcggacgagagctatggttcacctaggcgagctcgcagcaccccgatccgagaccagaaggtgtcgggggctaagtatgctttcgcaacgtcgaacttgaacttagaaataagcagctcatttcacaaataagccacctctggaggtggcttacttcggaaatgagcagaaaatttcccaaaaagtaagcagagcaactcccaaaaagtaagcaaggttcgacccccccccaatatcaataccatatcaataaaaggatacatatattgataaaaatagtattgtgaaaaacgattaaaatgtcttattggattgttaatccgccgatttagtggcttaataagaccgacgacccctgatttgataaataagacctcctaattagactggggtacctcggtttatactcaatattactacctaggacgacttacagagtcagagcatatgagtcggatttacatttgctattcggccgattaagccaggggcggctgatttgcttactattcagatggaatgtccgatgtgcaaccggcattcgctcgttgtaggctaaatcagccgtcagacacaatcgttgcagtcgctcttggctatgtagtcaaggctacaacactaacatcagaactaagcaggaaaagccgcacgctataatgcatgtaactgagatatgcaggcgacgcgtttaagcgcggtgctgtagcgagtctcgggccgagggtacatgcatgttgatcgaaattgctaggctgcacataattacgagacccatgagcgatttatactccaattataattgagacatccccgatttattagtcttcaaatccgctatgagcgatgtttaaccggctaattcaacaggacaaactaatcggttttcacaatacctgcagtaatttggctaatgtcgccgtctcctattcttttgcagcacttccttgtactcggaccaattagtcttcatcaagcacatcgtctccgcccggtcgttatcaagctgggttcgcaactcgttctctacatagtcactaagactgaaacatcgctcttgacacacggtagatagtggtttggcgagacaaattctcaagcttattttcaaccgaaaagggatgatccttgtgagttctgagcatgtgcttcctggggttagcagtcgtctgttaccgcattaagcatgatctccgtccagaagaggtcgggtccgtgctttttgtgtgtgctgcccacacgagacagatgtggctgcttttcttcttggaagtgagtgtggcgaagtggatccgcgaaatttgcagatcgcgggggtcctcttgcacacggcgcccgaactgccgactaacggagggggtactccgatcttccgtgaagttgctgatcctcaccttgtgtacccgtcggtgggctggatcgctcttcgggtgatctcgagaagacgcgcttggagttgagtcttggactgtctggtggacagcgggaacttgtggcagcaacgcggatatgcttcacgctgtgccggagtagttgtggcggtttcgatctggggttgtctagatcgacactcgccggccaggtgtgatcttggcctggggttgccttgtggtcggtgtgtgaccttcctttcctttcacgctgggccaatctatcctggcgtccgaggttccttgatcttggggtgtaagtcgacttgcgtagcgtcgggtgggccaaagtatatcctgtgcccggtattgcgaaggcgaagaccacttgtgaagaaggaggtaaaatcaactctgtttaaaatgttagcttgtcctaagtccttgtcatatcgttctcctgcactcctgcgctcgtgcggtctgtgcgcgtgctctctagctcccttgaacgttggtagtgtcgccggctctctgcccggtgtctgcgcaatccgtgcggtcgagatcatcactctttctccaagatcgcgtcatccccgccaagatcgatatcgtcgacttggatcgattacgccggggtttggctctcaagcacctacagagatgttgttcaccttgatgttgcccccttgaccttcttgctggttactatcgtgccagactacgcgtcgccacgctttgccgatcttggtccacactgtcgatcttggccatcttgttgatcttgggtatccgcgcgaaaatatctccatccactacaccacatgagtattgcacccaactgaagggataggttaaatgatttttgcgacatgaaagtatccgtccggcgtatagtgtatagtttattccccccctccctcgcgccacccatttggaaacaagcggcgaatggtgcacgacctgccggtgaaagcggtggcgcgcgccgcgccggagcgccgtccgccaggcagcgcgcagggttagcggcgacgacggcagtgattcttcctactgccccccagcagacatcggcagtgaacaagagtgggaagactcagcgagctcggcgagcagccacgcgtcgcagccaaagtaaggccggactgaagccttagggcatccgcgtactccgcgcgttgctgacgaagaggagccataggtcgccccccccccccccccccccccctctatcgaaacgcgagtttggctcgtggggggagctggaggtctgatatcttgtagataaatgcttgcgtccaagtcgtgaacaacgacgccgaggttcttgagtttgttgttcggtttactacatggtgactgtaccacaaccacgggttaagtgagcacacgttcggccagtacccacgcaataggaacgcgttggagccggaggtgctttccacagtggacacgctccgtaaggctggtgcctcgaagaaacgaatccagcagtacattcacgagaactccgtatgcacccccaccaaccaggacgtgcacaacctcgtgagacgactggaaaagcgtgaacacaccgcctctaccagcgcaaagtggctcaagcagtgggtgcaagaattctcggaagaaagtggcaatgttgcaggaatttttgttgactccgtacaaaataaggtatgagcttgtttggggatgtattgattgatcatgtgttaatctaacctatccgttgtatttgcttgtagaatatcgctacctgcattaccctccaaacggcgcacatgcgtcaattatttgactttctccctgaagtatggatgattgatgccacccatggaaccaattcctccaagtacaaggtcttctcgattatggctcacgacgcattcggcaaagggcagttcgttcagcatgccgtggcgcaaaacgagcggctgccgacgttgctaacagcgctagaggagttcaagcgcaacaatccgacctggactcggattcggtgtatccttatcgacaaggattttaccgagatctcagtggtgaagatggcttttcccgacgcggtgctgctactttgccagtttcacgtcatcaagtatctccgagaggagattgcttcagcagaatatggattcaacgcgtggcagaagcagcagctacaaggcttggtacagcttctcgtctacgcgaagacggagcgagagtacaagcgattgcgggactatatgcattacatcatgggaattggtcgtcgaagtgcgtctggtcgtaccgagttgggtccgggtagttctgagttgggcgctggtggtgctgagttgggtgctggcagtgctgagttggagtctgatggtgcttaattgaacgcggagctgggggctggccgtgcggagtcgggtgccgatgcagaaagcaatgatgatgctccgcagcatccatttgaggcgtacttcgtgaaaaactgggacaagtgtcggagtatgtggtgtgctttcgagcgtcagaacgctgtcacgctcgctaacaacacaaaaaaccggattgaggcatcgtggaagcaactcaaagatctggtggactcattcatggaagttgatgagtgtattgtttcgattatgtactaccgagcccaggaggagaagaagttgatggacagcttgttcaagctttccgttgtgcacgaccccaagtatgaccgcgaaattcagttgctttcgaactagatcagctcgcatgcgtgtgagctcatctatgagcagtatgtgtttgcgactacacggggcaagtacaagtacaaggaggcggtccctggtgtctttttggtgcaatacgtatcggacgaagaggacgcgctcgatgaaccaacgagtaaatactcggtgatgaagcgtgactggacgtgctcgtgcatgttcatgacgtcacggctgctcccatgccgccatgtcttctatcttcggaaggctctcggctttgagagcatcattcatacccaactgctacacccgaggtggttgctgacgacgctgcgctcaagcaccgacgcaccccagttgcctggggcacctcttgctgtttctagtgttctgccggagcccagggcaagttggaactcgaatcgaaagttccgggagactaatgcagtcgcctctaccattagcgagcagctgagcggcctgggtatgcgagtacaggacggcgatgaaagttcttcaagatgtggccaagcgtttcaagcacggtgaatatacggcaatatccaggatgacggacgtggctgaacctgcagatgctctgcaatttacggagctaccggctgagcaccacgttgcgcaagatcttgacgtgtcttcctccgctagtgtgcagaccacccagttgggtatggatggatcaccgctgggtacggatagatcccaactggggtcatatgggtcacagctggggtcagatgggttccagttggtctctgaagaaaatccgacaaacccagacggcctcgacacctccgaagaagtcaattctagccaagccgagagcaccttacctgtggcggttgcacctccagttcaagccaagaagaaataacaacatgcagtggctcttcgcgaagcaacaggtgactttggcttgaaagcccacccaaacagcgaggacgacccaagcagaagacacgagcagtaaaggcaaagagaagcgagaatgctgccagggtcgaagaggatgtcaacatgcacgaaaatggcctcagcctggttcagcgtacgagctactggaagacaacccgacgttcaactcgactcatgaaaaactactgcaattcaagttgtttgttttcgtgagcaagcagaaaccccctattgctcatgaaattacaaagctacccacgaacaagccgttgatgagacagaagagattgtgcgcatgttctccaaggacctgatcaagaagtgcatggcgaatgtgtcggcctaccagcggaagcatcccggtgttcgcgaacttgacatcgcgcttgagatcctcggtgttggggtgtttgctaattctactatcgcactcatgaagaaatggcaccgggcgtgtgacgtcctgaagcagatcgagaagacgttgaaatggttgaagcagctagaattttctcgcctcgccaatccgagctttgctgttgaagaagaccctgagcttccggaaaagctgagagccattgaaattctatctaccgaggtacactcattatctctgttattttccatggttatttactgactattgtggtgaattgtttttacatgcagactcaagtactggacctcactgctaaggaatgcattacggacgaagtgatgagaacggtgatgctcaagaagttcggtcctgatcccaacatcgtcattttcgacgcatcggcgctgggcgttgtcgtggacggcagtgtcggtgccgacactgcaagcattcggcggacgatgagggggctgtcaacggaggttgagctctttccggtgaactgcaacaacacccactggtgctcaatcatgataaacctcaccaaaggcaaggtttccatctacgattctagctcttcttcatacctgcttggtgttcgtgctgtggcgcagccgctaataccccttctaccaagtaccgttggaatgagtttgcgcgtgcagacatacgagtcgggcctcggggtgcaaacagatagctacaactgtggtatctacgtgttgattgctttcgatatcttttgcggagctgaaccgctgggccactttgacaagaagacgctgcagtgcctgcaataccgctacctacgtatgtgcttgcaagattaaggtagcaggatctaacagatgataacaagtttggaatcaatgtatttgttcgtgctactcaaggtacttgctggtctctgaggttcgtgcattgcaacttgtgctaaggctgctcgcgagtctatgaggttgaagaagaacaacttgtgctctcacactccaagtgacatctagatttcagcttcaagtctctaagtgcgattcaagcatgtaagtgcgttttaagcaggtaagttcgtatctgtaagttcgatttgtttgcaggacacgcgccgtgtcatcaagctgcgtgtccaccgtcgtccattcgtagcgatcggcaagcaccgccttccggctatacagctcaggtgtatacctatcggcactggctctatcgagttggggttcagatgggtgctgcatgggtgctactagggtatggttggtgccttgttggtcatggctggtcacgactgggtgctcgtagcatgtcacacatttttcagttggttgcagcaacgggtgcctttcttctttgtgtcaggaatcggagtagcaagtacatggatgaactcccagacgagaacaaacatgttctggtttgagtgacgcacagatagtagaataccaactcgactccaacttcgccttctttatctctacggccacgatcactgggcgacgtatcctcgtcggccattctctagagagcgctcacgcaaccgaaccgagatggtagtagtagacttgtacttgccgtgagcttgttgggggaggtggctatatgcaagtaactatgtgcggtagcgcacatggaaataacctggttggtgaaatctacgctaggtcgcaggatatcgatatttatatgccgaagtatcattggatctcgatacagcaccaccaccaatatcaggtgatactgatacaagtatccggccatacagtatcaatatttattacaggtatcagccttgatatgaacgcctgggcccgaggcaactctcgctctgatcgaacgtcaccattgcagacacgtccgcaagcgcagctgtcccgcacgatacctgagcgtggcgagtcgtcattagcgaacggtcttctcgccttgacgttcgactagtgcacaacttgacaaggtgcactcaccaagcatagttcttttgagacttcctctgttgttttagtcacatccagggtttgatagtatcacgattttcttcctaaactactatagtagaatgtaggagcgcggatgaattctactatctaatattagcggtttttcagaatctaggatactatagtaatagtactatagtagtttatactagtagcggaacatctcagtcgcgttgctccgttgagttgcttagaatctcaactacaggccggcgtccccgcccacccaatggatctaatgaagctattgattaattgggtctcagccatcacgtgcagatcggtgcaacttccgatccgacatcacatcttcgattaggaacactattatcgtagaactgcatgaagaactcgtcattgcatgcaagaagtgccttgcgagctttacttgctggaggttccacccccagacccccgcaatggaaaacaaactccgagttggggcaacgggtctgttcgctggaatgctcgtcgctgggcccgcctacgcaaataccgcgcggccctgcttcgcgggcaccccgcgcgggtttgcgcggctacgctcctcgcaaccactcactaccgcttctagtactgcagtcaatgatgctctggttggtatgcacgaactcgaagcgagagtctgtccaatcttattttcttaaataaactgtaggagactgagtctgacgctcccgtatataagcttgctgatcgcgttccctccactctaaatcagggtacgaacgtatgcgacgaggcgtctaggcacatcatcagagccaaaaaaagtaacattttagctaaagttgcacctgtcgtccctttgctgagccagattagcatttatctgtttggaaaatgccctctaaatcgtgtacctccgatttaatgacatacggtcactaaaagacgcatctttatgcattgaaatctcaaattctatccacgtcagaattctggaaatgtcagtaaacacaggattttttggtcaaaaatggccctgggcgactcaatcagaatgtcagccctaacccgttccatctaaactgatgtgaggtaagtaaatgcaggtatggacccttgaaaaagctaagtaaaagtaagtgcatcaatgcaaggggggacttcgtccccaattaccattatcgaccaccaaggcatcctccttgtcgaccaccaggcgtccttgttttcgagctccatgcgacgggtttacttgttattgtgcttccacagcacctggtggcgctgaccaggtctccgttgccagcgaaggcgacaaccgcgtagagggcgacaaccgcgtagagggcgacgaatccatcgtaaaatccaccaccgatgccgccgactaggcctcaacagactgagccaattgaaccagcagcggatgcgagttcgagctctgactatgagtcaatgacgcaacgccgtccggggttatcgaaggagacgatgtcgttgtcttccaccggtacaggctcgaagcacaccaaaaacgctccgacaagctgctgcaccgtacagctcgttgctgcggatgtggttgttgagcagtgaacggggtgtgaggaaggaggtaagttgagaactgatgtgcattgaggtgctggcggcttgcgccgtcagctcgtccgttacctaggtgcctagagcacgaacctcactatgaactgggtgaacagcttctctgcgtccgtcgctcccgagttctcggtcgccactgctacgcctgtcgcctcgctgtctccttccgcactgctgcagccctccgctgccgtcttcttccgcactgctgctgcccgccgctgccgtctccttcagcacccagcagttcgcggctgctgtacctgttcgcacctagcagcctgtcgttgctgcctcgatccgcacttaaccgcctgtccgttgatgtagccatccacacttcaacactccttcccgggacgtcctcattcaagcgagaccagctctcgtagctcgccgagggtggtgctgggaatgacttggtcatgaggtcggcccgcatcttacgcgattcgcagtactccaccacgatgacgcccttctgaacgaagtttttcacgaatttcaccagaacatcaatgggctttgcctttccagatgagtcctccccctctaactgcttaatagcagcctggttgtccacatgcatgaggattggctcgtggatgacgaccacaagctcaccgagtagttcgctcagcccaagcagctcacttgcaacttgtgaggccgctacgaactcagcctctatggtcgagagtgcaacggtgttatgtttcttacaaaaccagccgaccaccataccatcgatgcatagcacccctccgctcacagacttgcgatcgactcggtcggccgcgtaatcagtatcgctgtagccctcgagcctcacctcggccccctgcactgagctggcgtcaatctccaggcgcagcttgacgtcgacagtacccttcagataccgcatgatccttttggcgttccgccaatctgactttcgaggagcatgtgcacgccgggtcacacggtgcacggcgaacacaatatcgggctttgtgcaccgcgcaatccacagtaggctccccacaagtgactgaaagagttgaactgtagggcgggacggtgtaccattcacatcgcccggtagcaaagcgctgtcgtcgccttcgtccttgtcgtccacgactggtaccctcaccgcgttagcatcagcgagcccaaagtgctccaacaactccaggatcgcctggcgttgattcaacatgtagccatgcagttcatcgtacacgatgccagtacccagaaacttggacacacgccccaagtccttgacgtccaacaccttcatgtcttcgaataacttgtccacattggcgacgctcgtgcccgtcacgagcaagtcgtccaagtgttctcctgcgactgtaaggtccgagccgttgcccctcttgtacacacagctgtcggtgtagcactgctcgaagccgagcttcaacagcgtcttccgtaggtgcagagcccacaggcgacccgcctgcttcaggccgtacaagcttttgcgcagcctcagcgctatctgcctttcgttcgcaactcccaggtcagccagcgtctcactgttcaccgtcatgcctcgcggcacatgcaacaagatctccacgtccggctccttctcagctcgcacgtacgcgttgggtacatccccgtgcctggcaggcacgttgtacttgcgcgacagcgcgagcacgatcctagcagagagaccctccagcgcggcgctaaacgtgtccacatagtccacgccatattccggttcattgccgcaagcaacaagcctggccttgaacctttccagagtaccatcaacatgcttcttagttttgaacacccatttcgagtgtagcagctttgcgtgtcgtggtttcgccacgatttcccacgtgttgtttacctccaacgcactaatctcttcggtcattgccttgctccaatcagcggcacggtcacagttcatcgcttcggtgtagttcttcgggttctccgagaagcttgccatggcaaccggcacatgcttgcgccccatgttgcccattcgcatacgagttggttccgctggcggatggggaacatgttcttggtgctgcgcttccgcctcgggtgctccttccattgtctcattgccttctttgacctcttggccttcgacctcttgctgcgctttgacctctttttacccttgccgcgggcagccactctctccttccgacgaagagcctcctcccgttcctgcacagcacgaccaaattcggggtcccctctcggcgaagctgcgcctgcagttgctcattgccgggcgcattcaacgtctccacattctgtacatgctgcgtcacgatgacgatgcggtcgtgcggcaggtacaccttgtagcctttagactcatcgtcttttccgataatcatcccgacctcagctcgaggcttccacgccttcttgcctgggtcccggtacgccgtgcacgcgctcccgaacaccacaatatcggccaactgcggctgcacgcccgtcaacatctcgagaggtgacgctcggctcgggttcgcgctcgtcggagtcctatccaggatgcacgccgcatactgcactgcgtccccccagaaattcaacgctagtccgcttgcgaagatcatgcacctcgccatgtttaggacagtcctgtgcatgcgctcagcttttccatttgaagcctgattcttggcctcacttacttgcctcaccactcacgttgactgacagaacaaatccacgttgcggtactcgccacctccgtccgtacgcaagacgtgcaccttgcagttcaactgccgctcgaagtacacaaggaagcgctcgaacatcttagcggccaggtccttcctttttgccacgaacaccctgcagtagttggtgtggtggtccacgaaattgatcaggtacctgttgccgttgcgatccgtaggagtcattggtcccttgaggtcactacagatcacaccgccaatcctgtcgatcggcgtgttcttgcccgagtcctgcttggactgagcgttcttcgactgtttaccttttgcgcatgtgaggcaattaatccgggccctgtcagtcagctcgattccagatcccgatgcgtcggccatcctctcgaccgtgtcgaacatgaggtgcccgaggcgttcgtgcagctccatcaacgtgcacttcaccggtgcgcactgcagactgtccttctcagcttgcttgagcgcagcatacacttcgctgctcttatcgtcgcgcggatccacattcactgcgtttcctgcgctcgccgcattcaccgtgttcacaaccaggacatcattcatcttctccacctcgaacacgcgagcgcgatcagcaaccctcgccaggtaccgacgctttcccttgtagaccaatacgaagcccttttcttcgttcttgcagtacgacagcaagttctgcgcaagtcgttcaccgaagtacacattgcttatcacaacgtcgtgttcagtgccatcaaccgcggcacgaagtacgatgctgcccatcttggtcaccgacatggactggtcgtcggcaaccttgcatgtctcgctacagtccacagggtcaatcaacaggctggcatccttcaccaggcggcgactagctccgctgtcaagcacccacgagctgctgttgctgttgcccacagcgagcgcgaacatcgcctagccttccttcttcttgcccgtgcagtctttcttcaggtggcccggttcgccgcatcgccagcagcgtcgctcgatgctttcgctgcctgcatccttgacagcattcgcgactagattaccgctgccaccgttgccaccgtggccaccgctgcgactttctgccgtgcgcgtttcctccaccattcatatccgcctcgagcgtgctagcgaagtccgccaattcccacgcttgtcgtagatggtcggcgcgacgacggtcaattctcgtttgcatcgccctcttgacgtcaggcgacgcacactcgcagatgtactgcagcacaaaacgatccgaacagtctgcagcactcgcgattgccagcaaatactgatattgctcagtccaggtacgatcagcacgcttgcgcgctcacatcatgcgagttgcttgctcaaccgtgatctccttttcgtacacttctaacatccgattcatcaaatgctccagcgttggcgactccgccgaccaaattgtcttcatccggtcaaaatacttgcgcgctgggccctcgaggtatcggttcaaagcacgagccttaaagtcctcgggacagtcgccgccactaatcacctgcgcggcgataagttcgtccaggaagctgacccccaatctttaaagcctgcgccgaggccttcgtacatctccttgccagagaatctctcgatcggaagcttcatgtccatcaaggacgggatcttcaacccgaagcctcgcggaggcgcgaacggctgctgctgcagacgcgggtccggcgcgggtgcatgctactggaacggcactggctgtggctgagcaggcgcgaactgttgctgctgcattgccgggctgatgcccattgcttcgctgagcgagtcggccctcactcgttgccgacgagctgccaggaattggctgaaggcgctcgagccggccgccgatgagttcgacacatacactccgtgctgcagctgggccttctccagccgatcgcgtgcggcgtctcgcaccagaccctcgatgagaccctcgagtcgatcaagccggtcaccactcgagtcggaagcaccacgtccgctctcgcgggtcgacgcgtcgaattggtcgccggcagcgtcatctccgacttgttcagcgacttggccaggcactgggacaggagcgactccaggagtttggacagcgtcggcgtcgtcgtggggtattgggctcataacctgttgagcagtgaacggggtgtgaggaaggaggtaagttgcgaactgatgtgcattgaggtgctggcggcttgccgccgtcagctcgtccgttacctaggtgcctagagcacgaacctcactatgaactgggtgaacagcttctctgcgtccgtcgttcccgagttctcggtcgccactgctacgcctgtcgcctcgctgtctccttccgcactactgcagccctccgctgccgtctccttcagcaccctgcagttcgcggctgctgtacctgttcgcacctagcagcctgtcgctgctgcctcgatccgcacttaaccgcctgtccgttgatgtagccatccacacttcaaccttggtgaacgccccggcctcacatcaggcacggatcggtcgtggtcaggtcggcgcaggagcacttggagctggcgcacttcacggtcgagctgagttgagcggacgagtacgaggtgtatcgtgctgctggatgattgctgaatgagcccacacagtgcgctacaacctctcaccagagcttgtggaccgcaagcgctcttgtagaccggtcccgtgcgacgaaccgccccgcaggacggtttgcgcatgcgcgcgccgtctaacagtgtattccctgcatatttcgagctgaacaagcaccaatccttgtccgtcgaacctctgcgtgctctagtagtccgatagtactatttgaggctgcaaaaattctaatatctactatagtagaatgcacccatctgagaaaaattttactagctaatatagaagaataatattatttaaccgttatttaataatattacaaaaattctaatattagtgatacagtatctactatcaaaccctggtcacatctctgtcataatgaagtcaagtatcggcgaggctccaacaccttggaacatccaattcgtatagtttcgttgtgaatcaaatgttggggacgtggcgtggccatggactttgaagtttcctcgcctcaacaggatggaaaaatgtaggttattcagtttcagttgcttatgttcatgtaggcggatcggctgtcgggatgttgatctggctcacaacatggtcaaaaggaaggtttcccaagaatgcacgtcggggtgcgttatttgaggtacggtacaggcatcccaccaacaactcaccaagacgaagtacattacccaagaaacgataaagatggaggttaaagcgcagagacttctgctctcttcaacgaacatggacaaaagtagagtctcgcttcccacaaaactaataatttgagttgtcagggactgcacagtcctagagatgctagatgctaaaacgattttacggccaaagtatcttacgtgtactctggtgcatttcagctaagctttactgtaaggcggccagccattcctaagggctggtgaattatttcgcaaaaaaatgtcgggttcgactcttatcaagatgttcacccagagaaggcggtcgcgcacagcacttcaaagcttatggacatgtagaagactctgacgaatcggtacgctgtaacgtacaggaaactggccataacgacagagatttcatcagccactccaatggacgaattgatgttttgtacctccacgattggcttcaggttcgccccaaccaattgtcgaaggtaaccatgtggaagggatataaggcagcctccgatgtcaaggtttgaggggtcgatcgagagcgactcaagcgcaagagagacacacgcggagggatctgccggtaacaagcggcgttgggatagctcagaggagcgtagctcaacggagcatcaagtcgacctcgctaaagagcagcgcgacggggagaaggcgatgcgtggctacgaagcgtttactcgatcctctatcgccgcgcaaaatgcgctgaagacactacagatgatgaaggacgctggtgccaatgtggtggggaaggcggctctcttcaggtgtctggaggctccgaggtttgcgaactttcatgttttggcgaaggaggctgtgaaacaagcactcgagcctggattcgcgctaccgaacgtacagctgaacgacaacgaaacgcaggacggaattgtaatggtggtgtacccgaagatggtgccaagcacctacgcgaccattcgagtgcttcgagacttgctcaagtgccgacttccgatcgagatctggttccgccccgacgagatgcggaaggtgacagcggcgatcgacccgcttcatcaactggcagcaagcgattcgataggcggcatctcgttccgagagatcaatgatcctctcgctgtcgagtttgcgacgaaagtgtttgccatctaccacagcgccttcgatcgcgtgctgttcctggactcggacaacgttccggtgcgagaccccagtttcctgttccagacgccagagttcctggacaccggcgccatcttctggcctgacttttggcatccgcagcacaccatgttctaccttggagaagactcgctgctgtgggagttgctgaacttgccattcgtggacatgttccgagcaggagagtggccagctactcatcgatcgtcggcgtcacgctgctgcgatcgaattgctccgcttcttcgccttccaccgaccgaatccgttcgtccagctcaaactcgtgtggggcgacaaggatttgttccgcttagcgtggctgaagctgggtgcctccttccacatgatccagcgtcctccagctgtagcaggtaaagttgtcaaccggtcattttgcgggatgacgatggtccaacacgacgcggaaggcgcggtgctgttcctgcaccgaaactcgcacaagctgaccggaggcagaatcaagaacccagccgacgagaagctcaaggccatgagacgagaaactcctgcagttgaccaagacaggagcgcatccagctccgaggagtaccccgacgcagcgatttggacgcatcttttgtccttccggagctcctcaccgcgctccgagtaccagatccagagctaccacgtcgagcccgagttcccgagggaccggatctgctacggccagcgctatctggacgccaacgagaacttctacgcgcaagagttcgctgacttgagtttctcggggctggagacggagctgcggcggtttgcgatggaggcgggtcagctccaccagaccaaagtggacgcggtcgcgacggagaagcaccttcagaagcgcgggcaattccgactgcaagctgttggcgactgagaaccagcagtagcaatcagaggcgctggatgaccacggaggatgattatgatcaggtcgaaacctgcccgaacagatggccgagctggcagagaccgcacaacgtcgcgtcgtggcagtgtgtctccttcggagagtgggtgagtgagttacagtggctgcggtcgagtcgcgcgtctgtcggagtccctggcccgctaaagcagcaatggaggccgcgccttgggctcgacgatggagaccccacttccttcagacgctgctgctcggcagcatgctgtacgcggcgctggtgctgggctgggcgatgaccaacatgcactcgagcggcagtcaggctaattccatgtcgatggagtttgagacggtcttggagcaggtgcagcgacccatgactcacgtgctgcagaaggtcaaggacacagtggaggagatacgacgcacgccttcgcctgaggagctggaggcggtggcgcacgcagactccgttccgaacctgccaggcggacaattgcagtggaggaacctcacgtgccttggctggcgagccacaagtggctgcaaacccgacggtccgcgtgtggtggcgaaggactcgagttgtgaggaggaagttcctgaggggagctccggttactgcgaggttcaggacgcgaacacaggcgagtccttccgtgtcatgcgtcggacgtgtgcgagttacaagaagtcccaagtgtttcgatgtgttgacgctccgcagttcgccaattaccacgtggaggccatgaatgccgttcgagacgctctcgctgcgggttctgctccccccaatgtcgcgcaaaacgaagaagctcaagatggaattgtcatggttgtgtatcccaagctcattgccagcgcgtacgccacgatccgcaccctgcgcgatgttttgggctgtcggttgcccatcgaggtttggttccggcaggatgaaatcgatcgcgtaccgagagcgctcacccccctgcagcagctagcgcagaacgacaccgtgggcgacatcatctttcgcgagatcaacgactcggaggctgttcgcttcggagccaaagtgtttgcactttacaacagcgacttcgatcggatcctcttcctcgatgccgacaatgtgcctgtccgagatccaacgtatttgttccagtctcccgagtttgagaggacgggcgctgtcttttggcctgactactggcatccccagtacaccattttctacctgcacggggactcgctgctgtgggaacttctcgacatgccgtacgtggacatgtttgaacaggagagcggccagcttctgattgaccgacgacggcacgccgcgccattggagctcgtgcggttcttcacattctacaaaccgaatccgatcgagcagcttaaactgctgtggggagacaaggacctcttccgcttcgcctggatcaagctgaacgtgccgttttacatggttcaaacgcctcctggggtcgccggcgcagtcaacgggacttcattttgtggcatgaccatggtccagtatgacgctcagggcgatgtgttattcttgcaccgaaatgccaagaagctcacgggcgaggttttgtacaagcctgtgaactatcacatcgaggccaggaagcgcatcaggtcgaggttgatcaagcagggcatccacagaatccccactgtggaggaagtggaaggagaggtcaggacgataaggaagacgccaccgccaaggcttgaaccggcagaacccgacggaatggcagaccaagccatttggacgcatttgctgtccttccggaaagatgccccccgttatgagtacaaggtcaagtcgtactatgcggcgccagatttcaaggagagacagcggtgctatggcgaacgcgactataagagagccaagtatttcgagatgcaggagttcgcccacctgagcttttctggcttggagacgcacgttcggcggtttgccatggaggcagcgcggattcgccgtggtaatgcaaagttaccttggttagccacataagacgcgaagattaagttataaggccagcttttcagtacaacgatgcaacggaaagagatcaccctacttgctcttcttgcgggtaatcttcggcatgacacacacatcttcgtgtcagtccaggaagcaaacctcgagtcgactctgacgagatacaacgagccatttgccgccagtctgccccaacgccccgccctcttagctgcttcaagagcttcgggccttcgcccccccccccccccccaacgatttttctgtccggcttcatgtgtggactcacgatgaggtacaccttgctacagtaatgtgtctgctcaaagaacgcctgatatatatgaagagaaagagtgtatattgaatgagaggtttgtcttgtcacatgcatctgtcgtattcactgatttaatatacaaacgtatgcccatctctcttatttatgacctctgattggatgtattctaatatcgatgtgctgatttgctgttagtgacactagaccagtaccctggactgatatgcggacgcatagtgggattatttcttcttgcatcatataggatttcacccgttctttaaagagacacattactgtacatgatcttccacgatgatgcgatgctgtgcgtttgtttaccaggtgctgcgctgatcgtcgcatcatcacctcactgcgtttgactgacggccgcgactgcagagcagtccgaaccggtagtgctggctaaatgcagtggaacgaggtcggatattcaacgtagagtgacgaacccctgcagcagtctacattacatgtagcagtgctggggcagaacgccaccattgcagcgctcaaccacaggcgtccccggcctattcgccacagtggtacttatgatgtttgcgaatcaacaagattcacgcggtctgaacataaatgagtatgtactgacttactacaagcttagctcaagaatacggtggaggtattcccgcatcgtgccacttgtcgcagtaggtctcgctgtacactcatctaaatcaatgtgtttgcagaagtagcgcgcaaatcttgagagcttgttgtacagaattctgcacgaataaggaacgggtgtacaactaatagcctcacatatttaatattattttccagtcgatgtggcgatacaaggtactgcaaggtactgaggtactaaggtgaaaaatccagtgccaatcatcagctctccaccctcgtttgaaaaatggcgcgcatttagcgatcttactagacttcaaactacatgtactgtagtggtagactcgcacttttgcttttgcacctcgccccacaagcccacctcctcccccactccacccatttgacagcgctgttgtggtgcgaggatgcctggtcaaaggttagtgcttcgaccatacgccactgttggaatcattccggactcgtaggtaaagctgctcttcagttcattttgaaataactaaatcagtacattggaaaagtatactcaactgaacatcaattgatatattctgcgtttttatatatatcaggcgttccttactcgggcagattattgtacttcctgtgcgaggtacattaaaatatacagccgggactagtgcgagtcgcgggccgcgactgcaacgtggtgcagactctgcgcggatgcttttacaagcgtggacgcggcgtcggactggcggtctgatgatccttccacgccatctgaaaaacttggcagcccgagatggagaaaatccacacctggccgcgcctcactttggcatagcgaggaccggcagggggtggtcgaggccatgccccactcgagatttcgactgtaaaggcgcagaggctcgatggcaaccgcggcgccgatgctgccccaagtctacggccaagcccagcgccagacgacggagacggagccgctgatcgacgcgcctggaagtcccattcgcgcactgtcggagccggtcgtgcggtgttggcagcggtggccgcgcgttttgctcacattgggcgcgttcgtttacgtgtcgttgttggtcgtgtgggcgtctagcaactcggacaagaccatcgacgatgcccagccctctgcagtccaagaagagtcacgggtgccagcgaggccttatccatcgggggaagcagcacctcggcgccttcaatgcgtggcctggagagctacaggccggtgcagacccaacggaccccgcgagccccagaacgacaagaaatgctccgacttcatcgtcaacggcatgtccggcttttgtgaagtggaggacatcgacacgggggagcggatccaggtcatgcagcgacactgcaccagcttgaagggcgacgtgaagttccgctgttcggacgctccgtcattcgtgaattatcgcttcgacggccacgcagcagtgcagaagctctagcccccggtttctccctgcctcacgtcaccactgacaagggagaaccctctcgtgacggcatcgtcatggttgtctacccaaagctcttggccagcgctaccgttcgggcgcttcgcgacgtcctaaactgtcgactgcctatcgagatttggttccacgtcgacgagatcggcagcgactacgcgttgctggccccgctgcagcaactcgccattttggtcggtgaggtctcgttccacccgatgtacaacccgcgggccaaagggtttctatccaaggtgttcgctatctacaccagccacttcgagcgcgtgctcttcctggacgcagacaacgtgccagtgcgcgacccgagcttcctgttcacgagtgccgagttcgaggcgaacggagcggtcgtctggcccgacttctggcacccaatacgcacgctcttcaacttgcacgctcgctcgatgctctgggagcttctggacaccccgttcgtggacatgttcgagcaggagagtggccagcttctggtgggccggtcacggcacgctgctccattggaactcgtctacttctacgccttccatgagcccaatttcatcgtaaagctggacgtcgtgtacggcgacaaggacctgttccgtctggcctggatgaagctgaaggctccgttccacatgatcgaagcgctgccagccatggctgggcgatcgatcaacggatcgttctgcgggatgactatggtgcagcacgatgcggcaggagaggtcctcttcttgcaccgcaaccagcacaaactaacgggtgagcgtgacgagaaactggagaaagaggcaatggagaacaaagtcgtccctcctggagaagcgttcggagctccgcagcctgaagggtacccggatcccgtcatttggacgcacttgctgtcgtatcgcaaggacgcgagccgcagactctactcggtggacgcgtatcgcgccgatcctcaattccccgagtggcagccgtgctatggccgacggtacgtcgagaagcagaagttattcgagctgcgggagatcgcgaacttgagtttcgccgggatcgagacggacgttcgccgatttgcaatggaagcagctcgacttcggcatgctcagagcatcgcgtgggtaggagggcagccgacaaacgttacgcgagattgaacactcgaacagtgtagttgtagtgacaatagagatatctaccgtctacataatttagatttattctacatacgcgctctcaatcggggctacgtggtcttcatggaggcttgaaacttttcaagctgttgagccccttccattgcaaaacgccgtaggtgggtctcgagccctgaaaagctgaagccggcgatcttctgggcgtagaagtgttcgttgccgctgatgtcacgctggccgtagcaccgctgccactctggaaagtcaggctcggcactgtaagagcgaattctgtagtcgatgcgacgtgaggtgttgcggaacgaccacaagtgcgtccacatggctgggtcagggaggttgtcgggctctggtggctccaaagtgggtggaggcgttcgcatcaaaatctcgcgttcaacttgtacaagttcgtcgttcagcacaactgggacccctttgtcgagcagcttcagtcgagcctgcttgcgcgcttcaacgtcgtagttgatctcttgtcgcttgagtttgcccgttagtttgttggaattgcggtgaaggaacagcacgtcgccattggggtcatgctggaccattgtcataccgcagaaagactcattcacgaccttgcccgccacagcaggcgctgtttggatcatggagaacgggacattgagcttaatccacgcgtatcggaagaggtccttgtcgccatacacgagtttaagctgctcgaaatggttgggactgtgaaacgtgaagaaattcacgagttccatcgtagctgcattgcggcgacgatcaatgagcagttggccgctctcctgctcgaacatgttgacgtactgcatgtccagcagctgccacagcaatgagtcgcccatgatgtggaaaatggtgtactgcgggtgccaaaagtccggccagaagacagcgccggtcctcacaaactccgccgattcaaacagatacgccggatcacgcacgggaacgttatccgcatccaggaacagcacctggtcgaagttgctgttgtacactgcgtgcactttggctgcaaagcgaagagctcgcttgtctttaatctcccgaaacgtgatcccgtctgctccatccttctccgccagctccttgagtggttccagtgctccaggcaccctcctcaactcgtccgttctgtaccaaatctcaataggcagtcgacacttgagcacctccctcaacgttcgcactgaagcataggcgctggccaacaagctcgggtacacgaccatgacgatccccgctttgggtggcccgtcctcctttacattaggcaaattgaaccccggtgccaccgctttcgccaccgcctgacgcgctttgaagtcgaaatttgcgaagtccggcgcgtccgagcagtagaacttggctcctttcttgacggtgctgcacccgcggcgcatcacacggaacctctcgcccgattccacgtcctcgacctcgcagtatcccgaagccccgtcctccaccaggcggttgcacgccttgtcgttggccaagtctcggggcccgtccgcactgcagccgctggtggctcgccacccgatgcatcggaattgacgctcggccgtcgtcccacccggaaggggctgaaccgtcaacgcgtgggcctcggccgccaattcctcgggcgtcgcagcgtgttggttgctgtttgtgaagaggtggacgatcgacatcggaaaactctcaggcgtccccgagctttcgtggacgctcgagacgacccagagcaggaccatcagcgagtagagcacgctgcccaccagcatcagccgcagcaaacccggccggcatttcggcggagcgaggggcaacttcgcggtcgagtcagccattgcgtccacgtgttcgagtcccgagccgggcggatatgcgagtgcggcgagcgcacggcagagcgggccggcatcctgttgcggcatgagactgcaacagatgactcgcaatcagacggcagacgagcctctagcttgcaatatagccgaagcttttatttctctttgaaggaactaagatactcgtattagcttcgtaaagtgcttctttaatgttaaacaaccttttgcggagaataactgaggttttgaatcggtgattggagtcttatgcagatcaaactgaagtttacggatttgataaaaacggataccacgggtactgtaaacatgcatgttgaattggctgaaatggctcccgaagttttgacttattgcttcacctgcttgttctcgcaacagtaccgtactaccgctgcatcagtgcttcctagcttccatcgcgtaatggcgcaagtccaattcgatgcctgagaagctcaggtctgcgacctcctgtatttcgaaggatcgtccacatatcgtttgccgtagcatggttgccactgcgggaactcaagctcagcacgatacgcgtcgacctcatacaacgatgtactcgtgttcttccggaacgacatctaatgcgtccagatggctgggtcggggtactctgccgactgcggagccattaccgactcgggcgatgggatctccacgttttccgatgttgacttcgctgccgccgcctcctcccaccgttcatcgcgctcgccagtcaatttgtgctggttcctgtacaggaacagcacttcaccatccgcgtcgtgctgcgccattgtcataccacagaacgatccattgttcacagcccagccattgcagggactgccgcaatcatgtgaaacggagcctgaagcttcagccacgccaaacggaaaatctttgccaccgtacacaagctccagcttccagaagtaaataggttcgtgaaatgcgtaaaagtagaccagctccaaaggtgctgcatgccgagtacggtccacgatcagctgtcctccttcctgctcgaacatatccacgaaagaggtgtccagcaattcccacagcatcgactgtgcatgcacgttgaagatcgtccgtctcgggtgccagaagtccggccagaatatcgcgtcagtcgtctcgaactcaagacacgcacgggtacgttgtccgcgtccaagactagcacccggttaaagtcgctgtggtagattgcgaagatcttggacaaggccccattcgctcgtggattggacattgggtggcgagccgctgcagtgatgccagcatcgcgaagtttttcccaatttcatcgacgtggaaccagatttcaatcggtaggcggcaccccaacacgtctcgaatcacctggatgctggcgtatgcactagcgagcactgtagggtagacgaccataacaatgccgtcgcgtgaggagcgttggctgttgttggcaacatatggcagcgaaaaccctttggcgtatgccttcttcacgactgcatgggcgtcggcgcgaaaacttgcgaagtaggggacctccgagcaacggaaagagaccttgcgctgcaacccactgcagtgggagcgcatgacttggaagcgctcgcccgagtccaagtcttcaacctcgcagtatccgctgaaccgccagtgatagtgtcgatacagctcttgtcgttgtgagactcgcgcgggccatcgggggtgcagctggcagtggcgcgccagccaatgcatcggagtctgcgccgagctgtttcccctgatggtagtcgcttcggttcgagatacaaagtgttgttgctgtccaggaggaggtcgtcgatctccgtgactgcgtgaactgtgggaaggacgacgagcactaagacgatgaataaaatgcatcttctcgactcctctattgtatccatacgcgaacgcatcgctggtcttcgaatcgcacacttcagtacgtattgctgggcgtcgtcgcagacgaccgagaataccgaaatgaagacggcggtgacctcgtcctagtataacgcgatcctttctatcctaggtcatgccaccaagaccagcaacactgcactttcaacgtgtctcagttgggtgtgcacgcgccccgctcaccggattattatcgcaactgacatcaacattttccaaactgaccctaaaacatcaactctgtgtaagttactgggggtgcaacccccagacccccgctataagaaaactaactccgagttgcggcaacgggtccgttcgctggaatgcttgtcgctgggcccgcctccgcaaataccgcgcggccctgcttcgcgggcaccccgcgcgggtttgctgcggctacgctcctcgcaaccgctcactaccgttttcatacactagtaatggagcacctcagtcgcattgctgcgtagagttgcttagggggccgacaccctgcagtggaatctccacttcaggccgacgtcccgaccctctaattgatccaattactcttatcaatcaccatgaccattttttgtagtgtagtgaagcaatttgcttcaagcaaacttagggctacgggcgtgttcgcgaccgttgtaatttagattctcagtttaaccgatgcaggtcatcaaaccaataagcaattagcaacactggtggagctgcatgatgaagtcttcattatcagcaaataccagaggtccgaaataataattgcgatccaataaataattgggtttgtaatactaatttttattattggagatcaacggttccaatacaatacagtattataccaattattgacaattaatacgataaaaggttgcacgggcgccaaacatagcaaagtacgtcataaaatgatagttaggtctacataggcaacgattaaggtgcagtaaaagccataatgggcaatcaacatctttagaaaccaatatgtacgcaagtcagaacatcaatgacgtccagatgtagtgaatcccgccgaacacatcacatcaggcgacggcagcggatggcaatcttctagggacttgagctttatgttttgatatagtgtgtacgccttttgaggcaattgtaggagaaaaagcgaagtgggtccgcgaagcagttgatcatacaaaatgcttagtctgtaacgtcatatcaggtgcacacactatgaagtgtgtctgtgtgaagcttgactggtcatgatgcggtgaacccattacctgtggctggcgtgggtcaccgccgcgacatgctatcgagcccttaactgcggtgataccaaggtgaaaccctggaatctactacaccagattaacgatatatagcaagatccagatatatatcgctcacgtattactaccggtaggttgtttaagcatccaccatgcaaagatttctaaagcaacacccaaaaaagtgtttctaaacgactctgtaatcatatgacgcacagaaagtggtttatttcatttctactcttctgtagaaatgcctcaaattgaagagcagtatatttatattgcggcaatttttattatttctccttgctgaattgtaatttttattacggtctgatctcgtactcaattcaatatagtactgtattttcggacctctggcaaatactctctgccgcgagatcaattacacaccagcagcaagagagcactaaattagtgccacgaatgatgctggactatatctcgcgaaaccctagatcacggttaaccgcaagggtgaactgcagcaccagtggttcaagatcaattagtggtagccgacagcccaaagcaaatacacgtagcaagggatagttgttgttaaaagctataatattcagtttcgattttccagcgtactcatcaatacagcatctcggctcccgatgcccgccgtacttcctctctagtgctaccatatcactttacacaatttaaaaatgttacactatcccaagattatctattctatcggcagcaagtggttgcgaggagccaaagcacacccgcgcggggtgcccgtgaagcatgtccgcgtagtagggcccagcgaccagcagggcagcgcgtcgttgcggcttggagctagttgcgtattaatatacaattagtgcgtggtgtggggccccagggtataaggaggccacctgcatcactgccaggagctatcctgtaggctacaggctatcgctaaacgagctagagtattgggacatggtgagctctgcgtagcacatatccatgcaggcaagttgaagtgcactctctttcagcaattccacccttcccagcactaactcactcgtagtaatggatgcaagcgctgacttggcactctaaatcagagtgaagccgaggacttggtggcgtttttttttgcgctctgtgcgatctaaagtgtagcaatttatctaaacccgcgattctgcctgtttgattagcgtttatcgtcgaggctaaatcgtgtctccccactttaatggcatcgaccccttctcagaaggggtcactccagtttttacgcagtaaggcgcttcaatggatctagagagagttcttcttcaaccatgtttttctgcgcaatttttggccccggggaagcgattctagatgtaaaccctaaccgttcatgtctcagattaagagaggtaagtaaagagaggtaagaaatagagtaaagaggagtgatagatgattataagtgggaacttcgtctccaattaaggaagagagttgatgtttttagggtcagtttggaaaatgttgatgtatttgcggtcagttgcgataatgagcccccgctcacctgatccagcatttgtatccatttgatcccgggattgtggtgacgaccacgagcggcaaagcagtgctttgaaagcacatgctccatgtaggggacgggccgatcatttgcgtcgtttgagccttcggacagaacaatcgcactgtgaattccttctcagggcatacagtattgggctgccgttgccgcagagtaaatgccgttgccatcctccttgcgacttctccaaagcctccaccgtcggcccgagcggccagatcctgtccagatcgggcaatgtacgtctcgctcggctcggaaacaatgcattcctcgctgtcaaaagctgaactccgctgcatgcaatggtgcctgcagcacgcttcagctgttcctggtggactctcgttgcaacctgaccatctctacgctttatcccaagcacaggcattagattgattcgggaattacgaaaaagtttcggctcactcgcagccagcttatcccgacgccacaccgtcgagtcgacagtccagacctctcgctctgcactcaacgatggagccacggcgcgagtcaaagtcgacgagggggctacgctggcaacaggcgctgttggccgtgctgttgctcagcagtctgttgtatgccagctttattctgagctggactctgcgggaccccgacgcgatgcaacggagacccgccgccagcatattccagcgcaacaagcaagggtccgaactgtcaaaaaatgctagcgaggtcgaggcaaccgccgatagtttgcttcaaggcagtgaacgggttgctaacaccgcggagctcagcggtgttgcggatttcccgtcgaacatctcgcagactcgatggttgaggtgcatcgggtggagagctacagcgggctgcaatccgagcggaaggcgagtacctgaaaacgatgaagactgcgacaggtcaataccgccgggctcgtcgggctactgcgaagtcgaagacctggactccctcgaaaggttcatggtgatgaagcggacttgtgccgacacgttcagaggagcttcaattcgatgcagtgacgcgccggggttcgccaacttccgcgcaaatgcgcaggtagctgtggacaaggcgctggccccgggatatgcattgccgaacacgaaccgcacggacccgaagttgcgtcaaggcattgtcatagtggtgtatccggagctggtggccagcacttacgccactgtgcgcgcgcttcgagacgagttaggttgctcgttaccgattgagatttggctgcgccgtgatgaaatgaacaaggtacctggagtgctcgagccgctctgggatctggctaggaacaagtcaggcggagagatcaccttccaggcgattcgacatcagcacgcgcttcagttcaactccaagatctacgctatctaccacagcaaattcgagcaggtgttgtttctggacgctgacaacgtgcctgtgcgagatccgagctatctgttctcgacacccgagtttgtgaagactggcgccgtcttctggcccgacttctggcaccccggccaaactattttctttatcaacccgtcttcattggtctggcagctgcttgatatgccattcgtcgacatgttcgagcaggagagcggtcagctactcatcgaccgcaagcggcatgcggctccacttgcgcttgtgacgttttacgccttccaccagccaaactacttcagacgtctccacttggcatggggcgacaaggacctctatcgcttcgcgtggctgaagcttggcgcctcattccacatgatcaaaactcctcctgctgtagcaggcgagctgaagcgggacttgttctgtgggatgacaatggcccagcacgaccccagtggagacgttatcttcctacaccggaaccaactcaagctcacaggcgaggcgaagctccaagactttgatccccgcttgaaaagcgcgctggcaaccgtacctcagaatgctgcacaagctaccgcccaagacaacggatacccggaccctgaaatctggacccacctcgtttccttccgtgacacctccccgcgttccgagtacatcatcgagaagcatgtctcggtcaataagctcaccggtatacagcgatgcttcggcggccgcgagctgcacaaaaatccaaacttctacacgcaggagttcacggattttagctatgccgagctagaatttcacctacgccggtttgcaaagaaagcagcagaactccggcagcgaaaaattagtcaacctgcaacctagcttaatttacgcgtctattatgtcgtctacagcatgaacatcgctcagaatctagctgctatacgtctcacaattctctgaagacccaagtacgcccatcgcgatgcccagaaagtgaagacggcgacgcaggaggttctgagagaaattatccggcaacggagtagcgcccaaacccacgagacactccgtgttaaatttcttaccagggtgcgcgaacatgttcactgcccgacgacgttggcgaggcgtcatctgcgtcgggatcgtgttgagcagattgttctgcttggccttacgaataaatccgatgccctgggggtacgggtcgataagcgctttgccgttcatgtagagaacttctggctgaccgtccgttccagtgtcctccactggcatatactggagaatgctaccgcaaagggtatccgggtggttctttaggtcttcgttgggcattgagtccacgccactgactccccatggtgagaagaaattcggtgcatgagccagctcgaacgctaaccagaacgtttcctacagagaaatggtgaggccccataccacgatagaacacaatagagatcagcttactgtaccttgtctccccacgagtacgtgaaccgaaatcgttcctcagtgataaaccagagcatgatgtccatgacagccttcccggcacgctccttgtcaataagcaccatggacgaatccatctcgtggattgacttggacttgaaggcaaacgtgttgaacatgtgccgtgacgggccgaatccccggggcacattgaatcgggcgtagtcaaactcgtgcagtagtttatggaggtacaccttccctgtgtcgtttcctgtgaggaacctcttgttggtgatgacgcggtcgtagaagaacgttgtgccggtgttcacgtatccttcgagactgcgtagaaccgccgggtccttcatgatcacgtcgtccacgtccagcagcatcacgtgccgcacgtccgtgtggtacatggcgagcggcttgatccaccagttccgaaacttggctgtcatgttggtggagatgacgccgcgcgtcgagagatcggtgcacacgtcgacaagttcgacgcggttgtcgagacggaagagcagctcaacggacttctgggatagctcttgcttcccacagtgatacacttgaatgagctctcggttaccaaggcaacgcagttctcggatgagggacaaccccatgttgagcatggcgtcgtgcagacacaccatgattccacgctcgcggccgacgctcctgtcaaacgtctcgcctcgacggtagatggcagacgtcgggtgtgagggcttggcgacgctgtctttaaacgcggtggtgtccattttccagtctacctgcgagcggttgtacgcgctgactcccaagctgttgctgaggccgacggaggcgttggtggcgagcatagtgttgacatagatggtcgtaccgaggacgctggcgatgagtatcagagccagcagaggggagcgcgcgttgcggacgaaggagaccttcataggagagctctcagaggctgctggtgcctctttctgtggaatagccatcgtgtccagtggcctattacgtgagaacccctagttgtaaagtgtgtcgagattccgtaaccagaccaggtgacgcatagatagaggtatgtgattggtcaaaaataaggctttgaagtgcttttgccagacggcggcttatggaccgaggagtcctggagcttgaaagcgctcattagttttttcgtctacacctattttaataggtattgaaaagtgcattctcctacatattaccaccactggactaggtgcaattcctccccagcaggtgcgggcacttagacgccgctgctgggcaccttgtccatctcctgctgctcgcattgccttcccgctctgggactccggacgagcccgtgctcctgtcggcgtttctcggcgactggaccacgagatggcgcgtgcaacaacctcaaatacaaagctgttgctataatatgtcttaattgagcgcaacgaaagttcacagcccgcctctgctgctagcagcgagcagaccaaagacgtcgtatccgcgctcgcgatcttggtcatatgactgcaagtgccgtgcgtggcagctcttgggccccagtaccaggacgaccgccactgctcagaccagttagcatcgagtctactgagtgagtctaccgattgataaagtagttttcatgaccacagggtctgctgtgacggcttgaggtcttgcccaaattgccaccttgtcccgcctagattggcgcctgcgttcatgacgacgaaggcagccatcgcagcgacggtatgctgttcccttgtgcgcccgccgtgcgagaagtgggcgaacatttgagccaatcaaacaggcagaaccagtgtaacgaacccatgctacgctttcactgttaaaaaagttgatacaccatcgtgtttggttgtatcgttgtattgagctgatcaaaattgttatgagaaatggtaagccgagctggttacgccggagtacaaatccctatactgaagttactatagttggcgattgttcgttgattatttgtttggattgcctcaagatggtgacacatggctgccaccgggtacggatttgatatttatgtgcatttcctttgatcgatagcgcagtcaggctgcaactgtagtatctgaagtagacgtgtttcgccttgtactgtagattcactaggtaacgttcaacggacgaccgacgccctgatcaaggtcgccaccataaagacggcttcatcgatcctccatgacgagaacgctaatgtggatcatgcaatatggtatcgcatttttagcataaacagcgagcaagataatactccaaataatactaaaacatttccgaatgaagaaagccagtactacaactgtaagtcaaatgtttagtggtgttataaactgtaaggttaactgttataaactttagatatgtgacttttaaagaagccacatatctaaatgatatttacggtaaactatattttcaccgagcacatcatgaattactggatactgtacagtagcatatcatcagctcaaaaaaaagatcatcgattctggtagctattgtatggatgaatatagtggtctttccgacagagagactggcaggattgtgactgggcctaatcagttcgcgttttgaccaatcacggagcttcaatagtgtagttttggcaaaaaggagataataggggtaggtttccggttccgacactttccgacaaatatttgtcgaaatccacacagtaaaatgaatatgtacatacaaatgtcaagtagttaacatattttttaaatattgtcatggctctgacaactaggtttattcctaaggtaggaaaccggtcggtggataggataaccagtacgtaggctttgcgtttgaccacacaattaaaagaaccaagcagtagcagacgaagcagcatgagcttagctgccttcgttcctacgaacacgcagaaggcgcggaatactgccgtcgccgcattcaagcggatgttggaggaggagaaggttagccttgagtttgtcgaggctagcattctcttggatgcctccggcaaacgtgtagcagcgacgatggaccgctttggcttctacctcgcaaccaacgaaggtaagaaaggtaagttagcccgcaacacgtgtcccgagtcggaacggctcggaccgttccaactctgcgtgggcgacgatgagtgcctaaggtcgtccacttgctgtggccgcgggcgagaagtagtgggccgtggaccgaaggtggagacccgtgggccgctacctagaggtatcttggagggatgatgtgcctcgcagtgtcgtggcgggacttcggggacggatggcgtgttggacggctttgagggccgtcaaggtgaacggatcaagtctttgggaggtggtgagcgggaacggagtcacccgaaggcactgaaacgcaaggatctgcagaggtagagaggaagcgttaggagtagaaggaaggtcagtcgtgaattttgcttaaaaggaccacacattttgcttagtgatctccttgctatttgtgccccataaacctataagcacaggcagcacttactactccaatacagcggcggccggccccaaaccggtccgaccaagcgactcgcgacacgtggtggagaagcagggtagtgttgccgactgtggagtgaacagtgctgagagcctgtgcccggaagtgaacagagtcaatagccgagcgtctggacctggtgactggacgtgtgaccccccccccctcctcgtgtttaaagtgtgccagggaaggacccaggagtccgcacacgagtacacgccgcgcgggaaaagcggcgtcgaggagcagtgagaggagcgatccaggccggtaggacaagggaacggtaacgtagacacaagagccaagtgtacagggtcaagagcaagaggtcaagtgaacaaggaacggtaaactgagagtgaacaaggaacggtaatctgagaagaaaagatgccaggaggacaaggaggaagaggtggtaacgctgaggaagcagcacgccgccgggctgaacaagaagaaagagcgcgttcagagcgtgccgcgcgggccgaagcagagcgtgccgctcgaaccgaagcagagcgtgccgctcgagcagaagatgagcgtgccgaacgacatcggcagaggccctcgacaccggcttccgggatgccgatgatcgggatagcgtcgccgccgtcccagcgaccgagggccccgccgccgcccagccaggctggagcgggcgcgccgggcccggttgaagaggaattgaggagtctggagcagtggaggaagaccgctgagtatgctgaagagtgagcgtccgtgtcggatgtgatgtgtgagctccgggaagatgatgaagacgagactatgaagagaaggaggcggtcaagacggagaccgcgactggagtccagccggtgacctcggctggaatgaagacggagaccgtggcggaggtcaaggcggagcccaccgtgaagggcgcgctggagccaccggtctcgagtccgatgggacggtcgagtgtggggcagccctacgctcagccgacggactatgggtacgactacgggatgtacgccgacgacgaggaagactaccacgacgcgatggaggagccggtcccgacgcagcgaggcccgagtgggttcatcacccgctacacgggtcccaaggcccgccgaacggatcgccctgccttcggatggagctggagcgctcaacatggttcggggaagggccccgagtatggaggatggagtggggagcggaagcgcggtgaagtcgccgaccaagtcgccccctccgatgaagaagttgcagttcgccggcggtccggccgggttctcgaagccggtcggtggcggaatgcccatgcaacctacaacgggccctacggcaagttggacgcctggaacgggtacggctccgccggctccgacggctgcaccgtcgacgagttggcgcggtgccagtggactttcgccgagtgcctacaacctgtctacgatagtctcgcacgccgtgaaggtgctgccgatgttccattcggacacggccacggtggagaaggcactggacttctgggagctcgtcgaggaccacacggacggtttccccgaccggtccagactgctggtgttccgtcagaagctgcgaggccgcgaggctgaccggtggtggaacaactcgaggatcaagtcgttcaggacgctcaaggtgcggttccataaccagttcctcagccggacggctgacgagctgtgggagctgctggagaacacgaagaggcagcgcggagagtctgtggaggagtagtctcggacctgtgcgagtccctcgactacccgaatccgcagatgcggtaccagctcttccgccgaggactgcggaacaagcgcatgctggcgaccttggacgcgagtcccgcgtcagacgttccggaggcgtgcgagtggctcatgttcaaggacatgcaccgtccgatcgaggaggacgacgagttctcggacagcgagtccaagaagaagaacaagaagtcggaggaggcccccgcgacgactgcggtagaggccctcgctgagcagatgaggtcgttcatggaacagcaacaacagtggcaacagcaacttatgcagcgccagtggcagccgcctaggtcgcctcgcaatcgagcgccggtagtggccgccacccctgccactcagcccgatggaaacggtcgtgggccagggaacgctcagccattccgaggcattcggatgggcgatgatagtcgcacgcaggatggttcgcctgtgtgtggtcgctgtaacttcatgggacatggtcgcgctacgtgcaagcgcgcgtcgatgagctgccggcgctgtggcgcgtttggtcatatcgcagtcgagtgtgacaggccccagaacggtggaggccagactgcagccgctaggggtactcaagctccgtctggttgtgttctctgccaagacgcgagccactccgtgatgcagtgccccgtgttggccgcgcttcgtgatgcgactccgagtttgttgaacgcggccgcccagagcaatccgacccctcgacagtgacgggggcgggaggaaggagaggagggagccactcctttctctagtctagaggatggctcagggggtgatcgtaggaggcaggcgagacgaaggcgttctgcggtcacggcgaggaaaacggtggacaaggttgtgaagaatagtgtgaatgaagggagcgtcgaagaggaacgcgtagatgcgccaagagcggaagtggaagttgagacggttgccggggcccgggaagagtggattgtacccagcggcgtctccgtcgaagaagaatatgaacgagagcaggggcggacggtgttgtccgtgcgggaagaaggtgaagctgagtgctggacagagttgtctgtgcacggcgaaaatgaggaaagcgtggcggaagagcctgcatattgctacgaggaagaagcggcgtgggccgttgcgagtgacgagaaggagaagatgtaccctgcggggaagacggcgaccgaggagagcgccgagcaggacaagccgagtgcaagggtgaagggggcgtgggcccatgatggggccgccctcgatggtaacgatgaagagactaaggaggccgaggcgaccaagctggacgcccccgcgggcgatggagaccccgcgagtggcccagcccgcagccccgagcgtggagtaggcaacgaagaggggacggcggctgagaccgtcgactcggcgtacgacgaggaccggtccgtgaggtcggagtagtcggcgtactccgaggaagaggaagtcgacggtgatgtgttctatgcggccagtgcggacgatgaagcgttctgtgctgcgcctccgagcgcgaacataccctacaaggtgcccacggaggaggtgccgccgccgacggagttgagagcggtgccgaggtcagtgactgcggcccctttgcgaagcatcctgaagaaggaaggtccccgtccgcgttggatgacggaggggccctccttcgaagggtggggcgacgctgtagatgtgggggacacactgttcgccgagtggaacgacgacggaggatcgtcggacggcgagcacatcaccgaggagaacgtcaacgtagtcgtagggcccgagccggtggcagggcccgccaccgagttggctgtcgcctaggaggaccgaggcgctaccgccgagagcaaggaagtacccgagagttccgaggtggtcgaggcggccgaggacgttaaggagccgccccgccacgctcgtctcatcacggacgaggagctggacgccatggagtgcgaggcgccgaaaccctccgttccaggcatcactgaggagctcgaggagtatgacaagtagctggaggacaggctccaccccctcgatgaagtggagttgatgcgcaaggtgaaggagaatgcggagagggccaaggacccgtccatggaagagatgtcgaagtttctgggcgtcccggtcgaggcgctgaccaagatgaaggacgcctcgcccgagggcacgtcctcgcccgagtactgggaggactggtacaggaacacactggagaactcggcggaggccaagcgagccaaccgtgacttcaaacagtcactggccagctgcgtctctctagaacgctcgaccgaggagccaacgtacgagtcgttcggcctgtcggagtccgacctggacccgaaggcctcgaccgtctcggtcgatggctccgtgatggaggagagcgtgactgcgaacattgcggtcccggtggatttctgtgaggagaacagcgaggagatggtcactgcggtaagcgtggacccgcccgtggacgctcctgaaccgagttcgagcgcttctccgagcgagaggtcggaggctcgcaaggccgtgtacttcttgctgaaggagaccaaggacgagatgttgcgtgcgaagaagaaggcggcacggtcgagatccccccgattcgtgataagcccctgatctagactgggtgcgcctagtgcacgatggtgagcaagttgctggtgaaaatgaagaccaaatcgattggcgagaacatgtgaagaaatggacgaacgagtactacactgagaacgctacgtatatttggaataagctactagatcgagttcgagaagcccactcggcgagtgcgaagcgtcggctgcggcgtcgctcgcggcggcccgtatgctttgacttcacggcgttgtaccgcgattcggccgaggcgctggacggggagctccgtgctgaagaagacgacgacgcgacgcactacgtgcaagtggtccgtcccgagcgtccaccgccggagcgtggacggaagaccggactggtggaggtggtaaccgtgaacttgccggacggcttcggcgtccgtgcagatgaggacgatgatgagtgtggagccgagctcccacgcgtagttgccggtggtcggcgtgtggtgtgcactgtggggaacttcgaggcgctgtcgtgcgggtacatcgactgcctgccttcgcagatgttagcggacacgggcgcgacgctcagtctcgtcgacttccgtgttctgaagcgtctgggccgagctggtgaagctctgaaggcttacgacgggcatgtacgcagttcgtctggacaccgtctgcgcattcgggggtggatcactctccccctaatgctgggcaaggtcggggcgaccatgcggatgctcgtggccgacaagttgcatgtggacgctatcttgggcgtcgacgcgctgggcgcgcggagcagtgattgacgtggctgagcgaacgctcatgctgaagagcacttatcgttgggcgtgatggtggtccacgaatcgttcatggccacgatggccgtgtccgtccgcttgccgcctaggggacaggccctggtggtcgcggatgtggtgggcgatgccccgaacgcgaccgtcctcgtcgagggctctttcaacttgccgccttcgctttgcgtggcgagaacgctctgtactgtggacgacggtcgagtcgtcgtggagatctgcaacgcatcgacagaagagttctggatcaagaagggcacggtggtggcctcgacgtccgtgatgcccgagtcggcgtttggctttgagcagccgtcagcggagaagtccgaaggggcgccctgccgtccgcccgagactagcggggcggccaccgttgctgccagtcgtgaagaagaggtaaaggggccggatctcggcgagactgtgagggcgtcgaggcccgatgtgccgccggacaaggaggtggcgctcgaggccgacttctcccagtcgaggctgtcggatgagcagaagtcgctgttccgcagcgagctggagcgcttccgagacatgttcgtggagtcgtccaactcgcccggcaggaccgacttgctgaagttccagattgatactggggacagcaagccgatgaagcaacagccctaccgcgtgtcgttcgccgaaagcgaggttatggaggcggagatccagcagtaccagaagctgggcttcgtccggccctcgaacagcccctgggccagccccgtgttgatgatcaggaagcccgacggtggcatccgtttctgcatcgattatcgcaaggtgaacgccgtaacggtcaaagattgctatcctatgccgctgattgacgacatcctggacgtgctgagtggagccaaactgttctcgaccatgggcatcgcctcaggctactggaacgtgcccatgcatgaagacagtattgctaaaacggctttcacatgcaaatacggtctattcgaatggttagccatgccctttggcctatgcaatgctgtacctgctatcgaacggttgatagagaccgtgcttgtcgacctcaagtggcgcgtgtgcttggtgtacttggacgactgcgtcatcttcagcgaagacttcccgtcgcacctcgttcgccttcggcaagtgctgacccgctttcaacaggccggcttcaaactgaagatgaagaaatgccactggggcaggagtcaggtcgcctttctcgggcacattgtgacacccatgggcatcctcccgaaccccgagaaggtgaaggccgtcatgaacgtgcagaggccgcgcgatgtgcatgatatctgttcattttgggggctgacgagctacttccgccggtatatcccggggtacgctctgatctctacgccgctggaacgcctgaaaatgaaggacactccgttcgtctggaacgaggactgtgaggtggcgttccgccagctgaagagggtgctagccactcctcctatcctagtctacccggacatgaaaaaacgattcaagctttacgtcgactcgtcaaagtatgctgtcggtgcttgtctaatgcaggaggtggacggtcgagaccgtgctgtcgactatgctagcaagttactgacaggctctcagaagaactggatcaacaaccaagacggaatctctgaaattgaatgctggggcattgtctggtctacacgaaagttccgctgctacctagataagcgaaagtttgatctctacactgaccatcaggcgcttacctggatcttcagtcctgtcaaccgcacgaccaatgctaagctcgctcgctgggcgatcgagctgtccaatctacaattccgagtgcatcacaagcccgggacgagcatggggcacgtggacggcttcgcacctccccaccgcgagtgtgaacgcgctgaccatggcggacctgctgaacccgggggactcgcctgtgggcatggccgacttgctgaacccgggcgactcgcccgagaccgtggccaacgactcagtcggggagccgtccgatcgagccgtggcttccgactcagtcgggaagccgtccaacgtggcgctcgaaccgatgactggagacggtggcggcgagacgagcacggagaccgcggtcccgttgccggaagacgctaccgaggacgagtccgcgccgacggacgtccctccgtcgtccgtggacttgttcggactcgatatggagcgtttgaaggtggagcagcggaagatcccgtgggtgatggccctgatcgcgttcctgacgggtggagcgctgccgctggaccctaacttacgagtgaaggatgtgaggatcgcgtccaagttcgccgtcgagaacgagctgttgatgcgcagagtgaatctccccgcgcgcgtcgggcccactcgatcgctgaccgtgcccgtgataccgcttccgttcgttgaaacggtcttacatttttgtcacgctgatctactgtcgtcgcacctcggcctcacgaagacgctcgagaaggtgaggcgacacgcgtactggccagggtgatgacaggacgccgaggagtatttgcgcgaatgtgataagtgcggaagtggcaagggttcgcgtccgtgacgcgctggtcgaatgcagagaatgcccatcgtggatctgacggggccgttctcgttgctcgtggtggacgccgtggggcctctgcccgaaaccgagcgtggcaatcgctatatcttagttttcgttgattacttcactcgctgggccgaggcgttcgccgtggagcgcttggactccatgccgttcgtggaggtgatggtgaacggtgtggtgtctcggcacggagtgccgtcgcggttgctgagcgacaacggctcgaacttcacgtctgaggtgaccaagtccttctatcagacgttgggcattaagaaactctttggtaccctcagactcaaggactcgtcgagagattcaacggaacgctcataggaatgctacgaatgcatgtgagtgaggctcaagatgattgggatgtttatcttcctagagtgttttttgcctacaggacggcctaccacgaggccctgggagattcgccgtttttctcgctgtacgggcgcgacccagtgcttccgatggacgtggccttcctcaatcttggcaagaagtggcggagtaatgaagtggctcagtataggcgagagctgtacagctctctccgttcctcgcgacatttggtttagcgtcagttgttgaaggcgcaagatcggcacgagcagcgcctggaagggcaagtcgaagtgaattatgaagtaggagacgcggtgtgggtctaccaggtgttcagggcgaaacgcggcgaagtgcgcacgaagtagcttgccttcgcttggcacggtccctatcggatcgtagccaaggtcggcgagaacgcttatcgggtcgacgtcccgactcagcctagcaaaacggtgaccgtgaacgtgaataggctcaaaaggtatcgtggcaagtggacccggccttatatggatgaagtgcccgaggatctgggcactagtgatgaaaacgaagaagaggggccgttggaagaggccgacctccctgcgtcgagctacgcggaacggttgacactaggaaatgaggacactattattgtgggcgtggaagcccccatcgtggaaatagtggtgaagatgaaggacggtcagggcgtgaagtacctggcgatgaccagcacgtatgaggtgttctggctgcccagggaggctttgatgccagagtatgcgtcgttggtgaccgcttttgagcaagcggacaggaggaagaaggggttgccggagcttcgtcgaagtacgcgtttggcggacgctaacgccctagtcgatgatgactatttgctgctggcgtagttggtgatgttcttgagctgaagaacatgtgattgtggatatggatttacgagcagctcaagaatggtggatatgcatgtcaagttcatgtttttatttgattttacctgcaaaattagtgctacggctgtgctggactcgactacaacgaaatgaagaagataaacggagatccgaggcgtgcgcatgactcacttggccttgtcgacgcttgcggaacgcgacttgagcttcttggttggaggctcgctcgccaactcgccgtcgtcgtctgcttccacgcccggcagcgtctctttggccgcgaccggggccttggtggtcttgggttgggccttgtcgtcctcgtcgctatcatccttggccgccggcttcttcttgtcgtcgctggagtcttcggcctcgcccgacttgctggagcgagaaaccggaacccctggcttggacggagtggccgctcgctgcttggcggctggagctcggaacagcacgggaggcgtcggaggcaacgccgtgaagacaccgtcctcgtcctcgtcctcgaagtcggagtcgtcgtcgccttgctcgtcggggttgaacggcttcaagttgttgtacacggcaaccttcaggcccaactccaagagctcggccacctccttgaccgtgtcttgaagggacgtgtctgagaggagagccttccatggtcctcggttgcggttgcccacccatgagggcacgggcgccgggccggtgaggacatccagcttgatgcgcgccagcgctcggtcggagaggcgcaggtgcgccgggcgcgtagtgtcgatgagctcggcctcctcgagcagctcagggatcgacgcgtagccgtcctcatcgacgatcttggggtcgagggcgcgctcgatggtccgctcgtagagggtcttgtccttgctcaggacaacgccgaggtcctccagcgctttgcccttgcccgagtgcttggccgccctgccgcccaaccacaggagcgtgtcgtgggcgctgttctcgaagtcgttgaggaagtcgaagtacccgcgctcctccacgttgtagctgatgagctcgttgcgtgctagacacgcgttcatcttgtccttgcgccactggtcggggttcgtggagggcgcgtacagcgccacctggagatacaactcgcgggagcgcatgttggcacggtagtggaggaggtgcagttcgcggaactccgaaggcgggtaccagcagcgttgcttgcgccaggggtaagcgagacggaacggagcgaggcccctgctgaaggggcgctgtgcgagcgcggccaggtcgagcttcgaacgcgctggcgccgaggcaggcaagcggaagtcgtaggccttggccttcttcttggtcgcggccttctgcttcttcttcgacggcggcctcgccttggaagacgtccgcgacgatgatcgggtccccgtcgatggccgcggaggcggggtgtcgactccggcatggacaccaacgccggcagcgggatcgacaggacggagtgctcggcaggctcgccggcctgcatctggtcggggtgcggcaggatcacgagaatctggttcaggcggcgcgcgtcgccacccgacaggacgtccatggccatggcgtccaggacgtctagcccctgggacgcattgttgacggagagacgggtccggaggcgcgcccaaaactcgcgctgcgcgatgaagacgtccccctcgtcgtcgagctcgagggccatgtccaggctggccacctggttgtcgaagtcggtggcgtcggagttggtcttcttgaccatgacggacacgaggcgaggcgaggcctgggagagagcgaagagatgcttggtgactgcggagtgcgcggcccggcgaaaattgcggaatgaggcaactttcagtggggcggctacggcaacttctgattaccacgtgacttcaagtgaattgacgaaatgtgactcaccttgtggatggctgcgaccgtctgaaagagacgcccaactggctggtcactttcgaagaacccgcgagcgacgctggtgaccaactggcagtaacggggcattgggtgccccgtgcctctgcaggtcgatggtgaccgccaagggctgcctctagtggcgcgcgcggacggtcaggacggctcggacggcgtcgaagtggtcgtcattatgaatttgtactgctggaacgatggagtgggcgacggacgtggtgaacggcctggcggcaatagtggtggtcgctgctgaggcagcagcgtgtcaagttgcggtggagcgtcgctgggagctggcgtggctcactgctggagcagtgtcgtggacggttacgggccccctgcgaagcatcggctcacggatcgccgctgcgttcgtcgacttcgccctgaagtggagcgtgctggccaagttatgcgtcatgcgctactgcaggtatgtccgtgggcctgccgtgcaaatgcagccgctccgaactcgcgtgtggaagtgttacgaggccctgctggccaccccatttgttgtgcttgtggtgtagcgggatcggccaaaatttggttaaggcctgatcaagcttcccaccagcgcccagacaccgactaacggaggaggtcccccaacgatccgtgatcggctgaacttgttctcaccttgtgtacccgtcggcgggctggatctgctctctcggggcaccgaagatgcagcacttggtgaagatcgagtgtcttagcgtgacgcggggataatttgtggagcagcgcggtagtcttcgctctgcgtccgattatacgccccgatcgagggttcttcgcttcgatcggtcggcctgtagttgatccaaggcctgtagttgccttttcgggtgtgctccttcctttcctgagttgcttgccgcttcctatagcgggatcgaggttgatcgagaggagaaacgatcgccggtcaagcacttaatatccggtcgatcgaagacttgcacacaaaagatagatctctagagtaggtcaaactggccaatgtattaatccagtcttaaccgtaccgctagttcactatccaaagtgtcgacgctgccgaggccaatgtagttcctgggacttggtgacttgaggggacttgtggtctttggtgcaaattctgctcgagagcgacttgccggggcttggtggtcttggatcacgtgtggagtcaaatctgttctccacaacgcaagtcgatcgaggccaatatgctcttcctcctcgagattccagaccacttgcgctccacggtgcaaattcgactctgatttatgtttagctggtctctccctactgctaccatcttgcttaccatcctacaaccaaacgattactggattcttcccctggcttcgcccccatgtgcttcccatccgggtcgatcggcgatccacgattggctcccgatccacgatcgaccccgatcggcgatcaactcccgatcgatgacctgtgcgagttgccgtgcactgccgatccgtcctcttctgtcctcggccgccctagatctgcgagattagtcgtcgatccgggcttgggtctacgtcgaatcacgccgcagtccaagcgcgatcgcccgtaatctgtcttgacatatgtgttgccttacgcgtcgacgttatccaatcgcttgagatctctcgatagaccctcttgatccgtgaccgcagcctgatccttgcctatcgttctgccaccatgtcgcttgatgtcatcgcagttggaaaatcttattcggtgcttcaccacaaccgccccctgtccgtaagtcgggccgcacggtggctcactgcggacaagacttcaccatcccagtatcaacggctcacacttcgtcgtgaaacctattacttccgcttgatcgaggcgggcaccgacgatcaccggcaggacccaaaggttgctaccgccccaggatcatctggaacagccgatcgcgtgtctcctcaacgaacttatccccaatacagagtgtctgccgcaacaacagcatcccccagctcggatgatcgaattcagcgtccagctggtcagctcgtctgtcgtgaaatcttcgatttttggaggccgatcgcgcatcttcgtagcatgaaagctacggatcaataaacaccaccgtaatcttcgtcactgctggtcacctctctcaagtcaatccgtcgtcaccaatccgatcagtccagatccatcgtcataccaccgccaccaacccgatcagaccagatccgtcgtcgtagcaccttgtagttgctccataatcacccgatctgcattcatatacacacaatcatatcgaatataaaaccccttcctccgatcaacgacctccccgtcgatccgtaactcacgaaggcgaccagctcgccctggcggtccgatctcactcttcttcgtgagtgcatcgcgccaaatcggttccggttcacgcgatctcgaaggaactcatgcaacaaagctccacagttgagatcagtctcgtcgacccagtcaggctcgtcataacccttccagtgtaccaggaactctcgatacgtccggccataccgagtcctgcggcctgttctcgtatccgtgatcttctccacttcgtaatcgttcgagtctcgatctggggcccagctgtcctccggaagtaagacttcgtcgaaatcaagtcgatctgcttcgtccaccgtgagtgcgatctgcggtcgatcggggaagtccctgaccaacttcagcttcgaaacatgcacgatcgggaataggtgatagtccgtaccagcgatctgaagcttcatcgtgtactcgttcaccttctccgccacacggaacgggccgtgccacaggtgagccagcttccatccatacccctctttcacacgatccaggtacagccacacctgagatccagcttcgatcgagtgcggtcgaacttcttcattgtgtcgatcggcccgatccgcgatcgcctcgcgtagtcgagcattcacctgacttcgagcctggtcttggtgcttctggatccgataacgccaccatcgaggattccgatcccgagtccgggtactacccaaaggtattgttgcctcgagcatcgatcgaggatcccatccatgcaccagataaaaaggagagtccccacggacccgatcttgagccgtgctgatcgcgaaggtcaatcgccctgcgtactcatcccaatccctctgatccagatcctccacgaacatcttcagggctctcgtcaccgtctgtaccattcgctctgcagtaccgttagcctgaggtcgatatgccatcgtcgctcgctggcgcatacccaggatcttgtcaaaaggcgcggaagaagtcagccataaatcccggctctcgatcgtgcctgatcactcgctagcaccaaatcgccggaacacgcactcttcgtaacactcggcgatcgtctgcgccgttcgggaggaactggccttcgcgatcacgtatcccgtgaacagatcgacccagatcaacagttccgtatttcccttgtacgacttgggtaacgaaggtatgtgatctattgctatgatctggaacgggtatgtcgcctggatgtttcccggcgactcgcccctgatcgtcggtcgtcctttgccggtctagcagtcgacacattcgccgacgtacttctgcacacttctgaagagactactcctttgaaagtgatcgcggatccgctggtatgtatgcccgatcccctgatgtccaccttccagagtggagtgatagtgatgcaggatgtcttgatgcagcgtctccggtgccaccagtctcattagtccatctccatctgcatccgatcgcttggagggtgggcaatagaacagcagattatcaccgtcgatctcttagtcggctgcgaggttgccataggatcgagcctcatcctgtgtcagatcagccacatttcccatcagatacttcttgatacccgcgatccacgtggcttcatcctgtgctcgacgaatccgatcgacccgcaaccctcgcacgaactcctcctgcatgacggtcgggttcggccgtgatctggtgcccgatcgggctgtcatcggcgatagtcgggcgatcgacacatccgatcggacgaccaggatctcatcaagtcggttcagtgtcacaagatccccatgatcgacatcctcctcgacgacgacgcccccttcacgttggagtgctggactggccaggctgtccgcacttccgttccagtttcgtttcacatgtaacagctcgtgatctggccagttctgtagttgatccagcaccttttgcttcaacaatgtcagcttaggtgctttgcagtcgatctcgccccgtacttgtcggatcaccaggttggaatcaccgcagaccactatcctgccttgatctatgccgtcaaggaggtcgaaacccaacaacagaccatgatactcagcctcgtttacagtcagcccttcagcatagcccgatcgggccatcaccacactgcattcgggtaacttccacaagatcgcgctgtatgcgcctccgcctcgcttgacgcgggcagatccatcgaaacttatcacgagcagctcttcgtccgcacgcacagtcgggatcgagacctgaatcttccgccggggctctttcttcggcgcgatcgcgatcaacgcgtcgtccatatccgatcgagccgtaatactagcggcgatcgccccaaatatctcatcctctcccttggtgcacttcgtgatacccagtgtccagggcgataggattgaaggccgggtgatcggaacagccacgccaacgtcgagtgtcgggtcaagacccggatcgatcgtccaaccagcatgttatagttcaggtccaggatccgtaacagcgccagcacttctttctccaccacgttgtagttcaattcattcgacttcagcgttggactggcgaaggtaacgggatgatagatctggtcgtgctccggcgtcaatgcggccgagatcgcccagccactcgcatacacaatcacgaccggagtccgatcgcgatcgaagtgcagcaggatcggtgtcgtcgcgatcttcatcttcagtgtcgaaaaggcacgatgagcacggatccagcgttcatcggcgaccccgacttcaggaactggtggagtccgatcgggattcactgggtccgtatccactgagttcggcacttgacgatccaggatctggcgcagatcagggcgcttcttcagctcggcgaagtccacctcgcgcagttcatacaggatcgccgcgtagatcgcgtaatcttccaagaaacgactgtagtagttgagactgcccaagaatgactgcatcgatcggagcgatccggggaacggcagatcagtcaaagcagtgagatccttcggattagcctctagcccgtcgttcgacacacgatgtcccagatagtccaccttacgcatccaccaagagctcttctccacactgatcgagacattccacttatcacaagcgtccagcaggtgatccacacgatccacagctcatcccatgatccggccgtcacaagaatatcatcgatgtacgatctgcgacctagcactgatggacgccccggatcttctggttctcctgactcgatcaagtccgtagtaacttcacagtctgacgatcgcgggatcctggtgaacccatacaacgcgtcgtccagaagtcgctggtagatctgaggagcgttcttcaagccgaacggcatccggttccactcgaacagacccatgtgggtgataaaggccgagatcgcacgagatcgatcggtcattgtcaccacccagaatccactagccatgtccaaagagcaataccagagtaccttatccagatcccccagcaaatcgttgatcaagggcaccggatataccatcagcctggttagactgttgacgagccgataatcgatgcagagtcggatatccacgccgttcttcttgatgatcacgacgatcggcgaggcccacggtgatcgagatttccgaatcatcttgcctgacaataatcccttgatcagctcggacaccttctccacgaactgaggggcaactttccggacacgttgagcgatcggcttcgcgtcgcccacatcgatgtcgcaggtgacgccccgggctgctgggggaagtgcattgcccttgccgatcagcaggtgattcctgtgccagatcttctttcgcagccgatcgatctcctccggggtgttgaacttcagatctcccaccttgatatcatcgatgtcgagatcataatttcaggaagcacagctaattcaccttcgacatcttctgctgacagattcccgccctcgtggtaatggacctgatcatcagcaccaacgtgtcgatttggttctgacgcaacgagatcgtcctgatttgaagtgggtgtggcctcaatttttacctgatcacctccaacgatcgatgagttttcggccacttgcggcagtcgttcagatgcgggaacaccatcgactactgtatcgtcacttgatctcgactcttccacagctaagacagccacagggtgtgtccgatcggtactcccgcccccaagatctggatcgacagcacaaccgtcgacctgatcggtcgatggcaagtgagggaacacgatttcgcccatctcaattgctataccaccggaacccacatgatctggcttcccctatggatcacccgcacgaccatcatgcggcttcacgtcatctatcggtgcacacgcttgatccgtgatcggcgaaggtggggggctgttcctgttctggagaacattcgtcctccgatccaaaaggttcacacaccaactcagcaggatccgaccgtgggtctagtggatctccgacgaggatagccaaagcagacgtgtggtgtggtaataccactaaaattctcttctaccaaaaggtattagagacaccaacaacacgctaacccacaaaggtaagcgcttattggatcaaaacctgaagaccaggaacgatcccttacaccgggtcggttgcaagcgcctctgtgcaccttagtttatcttcggtcaacccaaaacctgtaccactagccacgagctaaggctaggatactatgtagcgctttcgcgcaaccccactgcagtccttcaggaaggaagggtaccggcgtgttaggccttatacagggggaccaaggtaatacctcggtaggtagactaatacactcagggacactctaatcccacaaatatatactgaacgatactctgataccgttcctgcctctccggccacgccaactcttggtgctgccaaggaaactctcggtcaatgcacgataagctccccgacaggcatccacacgcagccgagcgtatccaggcactacaataagctagctacacttaccgaagtcggactggaccctagttggctttgggggaagactgtcattttattactgagctttctgaggccctggagcctcgttctggtcatcctatgatgagtcctatgtccctatacaaatatctagtgtgaacgatcgcaataaggcgattccggacacatcaaatgacgaccgcggctacactaataagtgcggccgaagtacgtaactaaatgcatctgtacctaaaggtgggtaccatgaagcctcgttcggggttgtattaggacccgacaaggcttctgccacaatctgccactccaacgaggataatgtcgtcagcttaaccaaagcagccacttccatctcgcacttggctgctccttgattgtaccttgattcttaggcgacgggcaatcgctccggtaatctccattttcgataccacaactgcccccgcctggacacgagcctccgcaacaggtgagcgtctaggcgcctcccgtccgtaaacttcatggttcattcatcgcgcttgcgcttgaccgttgcgacggccgctctcctggaccttcagtgttctggtccggtacgctgggcgctcttgctgctcttcgccatcagttggatcctcgttaatgaagccagctttttctccggcatcccaaggtgctgtcgatgtagtcaccgatactttgcaacgttggctagggtcgcaagatctttcattactcaccggtggtcctgttggtgctgataatacggttccggcgcaagctgcacctgtgaccgaggctccagtgacttccgtcgctgctgaagtgtcggtcgacacaccacaaggttcctccagtgatatttcatcttctgctagggccaccgaggatttgaggatgcttggagccgctacgttgcgcacggtgatacacatgcccgatgcattttggtggtcgtatggtccgacgttggtcgttccaccgataccgtgcggactgccggtgtttgcgtcttggttccgtttacttcaccttcagtggcatcttctgcagcgtgtaaaactcaatcggaacggcgtacggtagccggtcatgcttcaaccgtcagtccatccattgctacaccaccggaattccggtggtcgcatggtccgacgttggttattcggtcgatgccccgcgcactgcccctgagttataccttggcttcgtttcctcgatgacattggtgtctgctttagaaagtgctgcatcacctgagggtcaaactgagcagcatgccctgccactcttctggccgcaataccaatctaccggagttccggtggtcgtatggtccgacgttccatcgacatgctgctgaccgccgctcgtcacacatcgtccgcatacttctcagcgtcgctgacatcttctgtagctagttctgcgtcgttcgagggttcaacgtcaactgcagtagtcagggaacgtgcgatgactcgtccagtctcacaccattactacgtcggaacttcggtggtcgtaaaggaggcaggtatggttgccccagcttgaagctcgcgaatcgctgcaccgccaacgtcggtcacatcatcacttgcttcgttttcactcggagatagtgtagctgtgtcgactgtggtttcgttgccttcgttccacagttccatccggattttccggtggtcgcaaccaaatcgggtttagttgcctcagtctgtggctcgggaaccaccgcaccagaaacgtcggtcgagccttcagcttcttccacttttgcgtgagaaactgtaccagtgttgaccgtggttcgtgatccacttacagcaaatactcggtggtcgtaacgtaaggtctgggtaccccagcctccatcaagcgacccgctgtgttgcaatcacatcttttcgagccgcaccaattctcgttcagggttcccacagtttccgcgcaggctacatcaggcaccaccgccttgaacgaaacgtagttgtcgggcgtagcggtcccggatccactcgtatcttcacttcatcatcaaatccatacatcgttgcaagtcgaggtccggcgcataggcgcgaccttcttccacgttaatatcggcacccgaagcctcgatcacccttccttgagcttcatccttgagcttcatccttgttcgtttcatctgctggggtgttgaccgaggcattccgagatgccactccatcatgactcattcacatcacatgtaatatgcaaatttcagaaatttccttcgtctgtcgctgcgagctggatagccctcgcagacagttcaatcatcgtttccagtagcttcattcgtctgccatcgcgaactgggtaaccctcgcgggcagttcaaacgtcgttagcgtatgcaacttgtcaacgacttgggccacgtgcaaacatcgtgctgcgttcgccactcgtgcaggtcatcatccaaacaaacaatcgaacggtgttcgtctgtgcttaggtacgtcatctcaggtccgtcccacttccaaacctttaccagcccaccactgagaatcaggactcgtgtcttggtttacctcgttccatgtagggccaaatccgagtggtaggcttcagtcgagatgtcggtagcgactcctgcgcgtagtcgctgagattaatctcgttcgcggtgtcctcaacctccgggaacccttccgcaaccattgcatataagaatgaggtgtatttcgcctccaataggcttgcagggtcctctttgtccgggccatcgacacaattttctccatcggtactagtctcggtcgtggcggttcctgcttcagttaaaatgtcgttcggtccaggatcatgttcaccccagtcgatagtggcgttgccccacgcgaccgacgtttgatctggttcagggcgtgcttgcgtatcagtcgctgtttcggccatccgcggggcgggttccaccgctgctgttacatctggcgcgtcatgatcttctcccgaatcgtcgttcagctctccaacaccatcatcacgcttatctccggctgctgacacctcggccggggcttcctgtgccccatgttcgatgctataggcgttatgatcggtgcgcttggatgcataggccgctcggtgaagcgacgacccttccagtgcgtcggagtcggtccgtgcactcgcctcgtcgtctgaaccgtcgttggatataccatcacgttctatgtcgtctgcaccaggctcaataactttgaccgagccttgggagaccctggggtcgttagcatgatccgatataccgagcgaagaataatcgtcgttaggacgaccttgaagatgacctctcggccatattggagcgtcgagcggtctccgtaagatcttctgcggcgtcgagtaagtcccgcgctcaactgcgggtggctgtttggccagccattggtcatagagacatcgcttccttccatacagagtctcgtcacggctcgttgagtatgccagcacctgccactccttgtacttgttagagtctaatctcgcgtaaccagtctctcgcggtagttcaccatgtggtacccacagcaccacggagtcatgcttggcgcattgtgccgctgtggtcgtaatattggtgagccgtacccacgtcggctgcccccgtcgaaacctcgttacggtcggcacgagcttatccgtgcgtcgtacccacacatcgtactccgaacgaggtagccgctggcgcggcagtcgaaactctcgccactcgcgacagggtacatataaatcctcgatcggaccacacgaaggctgcgtgccataaggttcgtcatcttcaacactctgcgactttagcagcggtaccatgacctcgtccggaaggcgtgcggtgccatgaaatagatccagccggattccagccgggatcataaagtccatcccaaggaccacatccaccccggcactgtgatccattatccacatttcaaattcgtagacctgcttctacccgagggtgatcttgacgagcgtccgtcgccgggtctccatcacccctgggttgatcccgcagacttcgagacttcgcacacgaagccgcttggcgaagctgacagaaatcacgctaacattcgctccagtgtcaagaagtatcctcgttcgcgcgtcgtccacagcgccattgaccaaagctcttattcgcttcctcttgtatcgttgggacgaccaccacctcagtctctcaccgggcagtaatttcaccgctccgaggtggtcccctgatctgggctagacttgtgattaaagcctcggtcgggtgtccatcacgttcgtcatcatcatcttcatcaataccaatctcaacaagacttgcgtcccggttctctccattttcggtcggtttcacacgttcattgttctttaggtcgtcaggccgtttactttcgctcatgaacgcgaacagatagtccgcatcaacagcaggttcagctaactgtggcagcacgattgggaccaacccagtttcagttggcgggctgcctagtttaaatggcttccatacaccaggcttgcagctctggcgacagatccttcttgtcgaccttggacttcaggagcttggtgagctcgtggagtgcttcacacttcccagcgtcgtgcacctgtttgcacagtttgcaccgccagtagcagaagtgcaccgagtgggacgggcttccgcacgcggcacacggcccaaactggcgacggccatctcgtttgcggttggacgggcctcctccgttcctgtagcgtcggttgtcagaccggacgaacgttccatcggctgcggccctgcgctcagcgtcgttagcggcagcgacatgccgagtagactcgtccgagtcgtaatcggcgtctgaatcctcgtccgagcgttggtcgtccgagtactggcgctcatcctcgaagtaattctcgttcgcctcagcatcacgtcggggggggggggggggtacgaagtctcgttgcgtgcaccgaccgagcctccgatgttccattctgccatcccatcgggaagggcgtcgaccaaagtaaccctcgaccggtgcggtgacccgtcacgtcggccacggcggcggtcgtcatcacgacgatcggtgaggcggtcgtcgccgcggtaacgtcgttcgcggcggtcctcgtcgcggtaactcgttcccagcgataaccacttcgagaatcctcgttcgaccgcgcgtcgcgacggcgactgtcatcttgactgcgggagcggcgaaccgatgatccgcgggtcgattttcggtcacggtgacgcagaatgtcgttgatcttgtcttcgaggtcatgaatgctcttgacccgaacgtggcacagacggtcttctaagtttcggtcgtcacacgtaactaagaagtgttcgacgtggtccttcgtgtcacgatccccgtgctcaaactgcaccccggcgttgcgagcgcagccgttgagcgggttgaggtagtcacatacatgctctttgttctctcgtttggccgagtagtaccgagcctttgcagactgggcgaacttcgagcagtagtacttaatgaatgcctcgcacagcagtatccacgtgcgtctcgtcttgcgtggaagctggcggcaccaatacaaagccccatctctgagcttgagttcgaacggcatgcaccactctttgggcggcgcatgtgtccacctcatctcgtagacgaacgtacgaagccactacatggagtgttcgctcttgtcgcgcacaccgtagaacgacttgatgttgcagagaggtagatgcgtggtaatctcgagcttcggggttgagctctgattgtcagtcgcgctcagttcgcgtacctgacgggcccattcgcttggcaggtcgccctcgtaacagtcggacccgagatcatcgtcactcatctcggaggtcgtaacggcggctggatcggcgaccggttgccccgcgcgtgccaggcgttgcgtacgaaacctcggtctccctagccagacgttcactacggtccgcagatcgtggggttaccatgtgcgagtattgcatgtaaggcgaaggctcgcccttgactgcgaagactccgtcatccgtggctgccttccgaggggtcgctggtagcgggaccttggaggagtcaaccgctcccgaggccgaatgaagcttcgttgagcctcggtctgccaccccaagggcctcacgtaactttttcctccacttagtaagagccttggcggcggtggttggcgtccagctcgcgagtgcagcctccgtcgggagaatctggggctcgcaccccattgcacgcaggaggtccacagtgttctgagcgacctgccgagtgctcgttgagttgatcggcgttgccaaagcccctccgaggtccatccagatggcctggcggacctgcttcggggagaacaactgcatccactcacttttggccttcatcagctccaggcatcggcctagaaccttgttggtcgccggagtatcgccgttgaggggaggacgagtgccaaccggcttgggtttgcccctcctaccgtcaccgaggctttgaaaccctcggtcgcaccgtcatccgcgtcgcagccgggctcggggcccggcatgtcgttgaacgtttcggggaggtcgcgggtgatcgaccttgatcctccactgcggccggccgacacaaccgcggcctccgaagtctcggacatcacagtcctcacatcccagtcatcatcttcgtcatcttctttggcgtccgaggaatcaatcgccgtgtcgcatctcgccgaacactcgtcgatcgactccatccgatccgtcgctggggtcgagaacgagcttccggagcgcaccgatgcctcgttgcgcgttccactcgacttgatcggcgttgctggtaccgctgacttgactcccttcgccatcttttcacttcttcttcttcttcgcttctcttcttcttctcttcttcttctcctctttgctcgttggggtaagacctacaacaacccagacacacagaaggtcgcaccaatcccgggtcgcggcaccagttgtggtgtagtattaccacagggtgtgtccgatcggtactcccgcccccaagatctggatcgacagcacaaccgtcgacctgatcggtcgatggcaagtgagggaacacgatttcgcccatctcaattgctataccaccggaacccacatgatctggcttcccctatggatcacccgcacgaccatcatgcggcttcacgtcatctatcggtgcacacgcttgatccgtgatcggcgaaggtggggggctgttcctgttctggagaacattcgtcctccgatccaaaaggttcacacaccaactcagcaggatccgaccgtgggtctagtggatctccgacgaggatagccaaagcagacgtgtggtgtggtaataccactaaaattctcttctaccaaaaggtattagagacaccaacaacacgctaacccgcaaaggtaagcgcttattggatcaaaacctgaagaccaggaacgatcccttacaccgggtcggttgcaagcgcctctgtgcaccttaggttatcttcggtcaacccaaaacctgtaccactagccacgagctaaggctaggatactatgtagcgctttcgcgcaaccccactgcagtccttcaggaaggaagggtaccggcgtgttaggccttatacagggggaccaaggtaatacctcggtaggtagactaatacactcagggacactctaatcccacaaatatatactgaacgatactctaataccgttcctgcctctccggccacgccaactcttggtgctgccaaggaaactctcggtcaatgcacgataagctccccgacaggcatccacacgcagccgagcgtatccaggcactacaataagctagctacacttaccgaagtcggactggaccctagttggctttgggggaagactgtcattttattactgagctttctgaggccctggagcctcgttctggtcatcctatgatgagtcctatgtccctatacaaatatctagtgtgaacgatcgcaataaggcgattccggacacatcaaatgacgaccgcggctacactaataagtgcggccgaagtacgtaactaaatgcatctgtacctaaaagtgggtaccatgaagcctcgttcggggttgtattaggacccgacgaggcttctgccactatctgccactccaacgaggataatgtcgtcagcttaaccaaagcagccacttccatctcgcacttggctgctccttgattgtaccttgattcttgggtgacgggcaatcgctccggtaatctccatttttcgataccacagacgaccccgacccctctgtctcgggatcaccttcctgcaacggtccgccccctgatctgagagtatcaacgacggccacctccggatcagggctcattgccccaggttcgcttgttggatcgggtggacccgtcgactgatcgacgatcggggatacattgtgcctctggagaatggctcggggcgttggataaatcggtcgttcgacggcaggtgctggaggtcccgctggtacctcctggttcgtcggccggtcatctgtcgtggcttgaaaggctagattctgccattccacgtatcggcaagatccgatcgacacatatcctggggtccggggtatccgatctccagccagccacatcccgatccgctgattccgatgcaagacgaggtctttgtcgctgatgttggtaacctggagatatctgatcctgccgggtcctcggaccacagtcggcacccagcgatctccacgggtgacccatagcttttctcgatctgtcacattcattcgtagcggaagctcgatcgaatccccgatcgcgatctgcattccctgatccacacacacacgtgtctgacattgtcgttgtacagctggcgccgtccgctaagctggatcttgacttcgtcggggagacagatggatccgtccgcaagatcgaggcggatcccagctggaaccataaagtccatacccaggatcgcttcttgtcctgatagatcgccaacccagatatcgaagaaatacaccagcgatcctgccagcgtaaccttgatcctggtccttccttccgtcatgtacacgatttcgccaatccccacacattcctggctctgactcatgtcgacatagcaccccaccttacgagcaaaggcggtgtccacgatggacacctcggcgccggtgtctaagagtaagatcgacttctcattgttgatcttgccagtgatcttggcctggcggaaccacttacctggcgaatgatgtttccagtaccctctggactccccaggaaggagatcaggcaccacatcgccagatctgcggtgttcgctgacgcgaggccgacttcgatcgcgatcacgctccgggatctcggtcgtcacttctccatcagctggcgtgagccattcttccggtctgcgttgtttccaatagccccgcgtttctccagactggagatccaagggcacttcggcgtcagaacggctgaagtcgtccgatcaatgtagacttaagaccttggcggtggatttcgcatgcagatcacatgtattaccacttagatcagtccgtccacttactcgatctaccgtgttcttgttcacgaatgcagtacctagaacgctcggctcgtaccggattccaacccggcgagcgtcctcgtttaacatcttctcggcgatcgcgggcaacatgccagcgtgcttcaccgggttgaaccattgacggatctggttgtagaattcctccatcggacacttgcccatctcgtgtagttcgccacatccacggcacacaaacaggcagcgatccgccggatgacctctcttgccacacttctcgcacgtcaaacgtctccaacaatcgagatcggtgtgtttccacgatccacaatgtgagcagcggcttgatcgctccgatccgtcaggtgaagatcgcgatcgtggatccgatcgaggtgggtcatggttgagctgcgcttggttgcttcaatctggcttcgtcgcgtcacccccagcgttgcgagacttgtcctcggccgacgctaggtaaacgcgacgtagatcaccctccgagtccgacccgtctgatcccgtgtccgatccagactcctggctcgcgatctgaactgcacgcactgcccgtttggttgcagcagctggtgctgacgtcggaaccttctgacgatacttcgatccaaaggcagatcgcttctgtctgctcttcgcgcgctctcgagcgcgcaggacttcctccagatcttctgcgtccgcaagccggagtaaggtgagccgatcggccagttccggatcgcccagcgtctcgataaagtgttcggcatgttctcggcgggccttggaatctccgtccttgatcttcaatctcgcacgcagagccgccacattcagtcgattgaggtactccaacggcgattcatcatatctcttgcgagaatggtaatactgccaggcgactgatactcccaggccacaatactggatctggaaattccggagtagatcgctccacttgttccgcgtcgatcggcccagctggcggtaccagttcttcgccgggcccgccagtagatcagcgaaggtcaggcacttctcttcttccgtagcctgatctcgcaggaacgccgacttcaccttgctgatccacgatcgggcgcggtcttcgtcctgatccttgccactgaactccttaagatcggacatcgccgaaattcgcacacgctggatcaatgaggacccagtgagtcccgaggcagcggtggccaccgcagcaggggctgaactcggtagatcgatgtcgtccggatcgtattcccactgagagagatcatgatccggtgatccggctgactccatctcgacgtcccgcgatccaacgtcgtcgtcgaccgctggagtaggtgttaccaccgtggcctgttgttccttcagaaatcgggccatcgcagcctgaaagtaagactccagtctgccattcgactcatctgatccggttgcactggtggtccgatcggtcgatttgggtttctgcttccgaggtcctgatcgcatacgttcctgacgctggctccgtgtcacatcgagatcttgatcgaaaagatcgttcgcatcaaaggtgccagccacgaagccggcttccttcaacagcccgagcaggttcttcaccgccatcagcttgttatccgtcactcgggggggcgaaatcgggcccttcgggtcgtcgatctgctctggccgcacgatcaccatgacaggatcttgacgcaagaagtctcgcagttccttcaagtgatactgacgatccaggtcagcctcagaccagtcgagcgccgacggtctgggatcttcgtcgtccaagcctggcgctctcagcttcttcctcacgatctggtccttgtccgcgatcgcgtccaggtagctcggatcgagcctgatcggcgagtcagcgaacgcgtatcggtccgatcccgccttagtttgttttgttagtgaatctcggttcgcaccaagatccaccggggtccccgaagggacctggggtggatgttgaggtttgtcttctagatctgtctccagatcgccctcgattccgtcgacagaagtcctccgagcactctgtcgatccgcggatctcgctttgttcagcagcgtcttcgtcgatccgatatccgacgacgcctcttcccctggttctttcttcacttgcgcatcttctacgggctcacggtgcaatccggagtccccaagagatccgggcacgcgcaccattgttgtgtagcgggatcggccaaaatttggttaaggcctgatcaagcttcccaccagcgcccagacaccgactaacggaggaggtcccccaacgatccgtgatcggcggaacttgttctcaccttgtgtacccgtcggcgggctggatctgctctctcggggctccgaagatgcagcacttggtgaagatcgagtgtcttagcgtgacgcggggataatttgtggagcagcgcggtagtcttcgctctgcgtccgagtatacgccccgatcgagggttcttcgcttcgatcggtcggcctgtagttgatccaaggcctgtagttgccttttcgggtgtgctccttcctttcctgagttgcttgccgcttcctatagcgggatcgaggttgatcgagaggagaaacgatcgccggtcaagcacttaatatccggtcgatcgaagacttgcacacaaaagatagatcactagagtaggtcaaactggccaatgtattaatccagtcttaaccgtaccgctagttcactatccaaagtgtcgacgctgccgaggccaatgtagttcctgggacttggtgacttgaggggacttgtggtctttggtgcaaattctgctcgagagcgacttgccggggcttggtggtcttggatcacgtgtggagtcaaatctgttctccacaacgcaagtcgatcgaggccaatatgctcttcctcctcgagattccagaccacttgcgctccacggtgcaaattcgactctgatttatgtttagctggtctctccctactgctaccatcttgcttaccatcctacaaccaaacgattactggattcttcccctggcttcgcccccatgtgcttcccatccgggtcgatcggcgatccacgattggctcccgatccacgatcgaccccgatcggcgatcaactcccgatcgatgacctgtgcgagttgccgtgcactgccgatccgtcctcttctgtcctcggccgccctagatctgcgagattagtcgtcgatccgggcttgggtctacgtcgaatcacgccgcagtccaagcgcgatcgcccgtaatctgtcttgacatatgtgttgccttacgcgtcgacgttatccaatcgcttgagatctctcgatagaccctcttgatccgtgaccgcagcctgatccttgcctatcgttctgccaccatgtcgcttgatgtcatcgcagttggaaaatcttattcggtgcttcaccacatgctggagtccaagggcgagcacgaagacgggctggggaggttgctctacaagtggcttgacgcccttcacgagttgtggtgcgtcttcttgcctgagacttgggcgtcgggacggaaggcgtgctccaagttctgcacggacgcgagtctggagtctggccgttcggtcgcccgtgccaagcttgtcgccaaggtggtatggacgctgacgtccctgatcctgttctcggcgttctacgccccgctgttcatctacgaagtcttcgagtggatctgccagggtgtggccggcgtgttcgccgtagtcgtggtcttcgattgctggttcgcctccgaggagggcgagcaggcaatagtgactaactactggttgcgctggtatgcataaacagcaagctgtggaggttgtacgaggcgtcggcaggcgagcgttcgtcgctgaccatggccacggagggcaacgctgtgtggtgcgcggctctcgaggagcaggagcaggctgagcgtctaagtgaggcattctggaggatggacggtgggagcaatgcgccgagagtgcgggtgcggacgcgcagtggattgcaggccggacggagggcctggcaagcaaggagagaagtagatcaagctgcgtgcactcggcgaggacgccgagatgcagtcggggaggatgtcccgagtcggaacggctcggaccgttccaactctgcgtgggcgacgatgagtgcctgagggcgtccacctgctgtggccgcgggcgagaagtagtgggccgtgggccgggttgtcttgaaggtggagacccgtgggccgctacccagaggtatcttggagggatgatgtgcctcgcagtgtcgtggcgggacttcggggacggatggcatgttgggcggctttgagggccgtcaaggtgaacggatcaagtctttgggaggggtgagcgggaacggagtcacccgaaggcactgaaacgcaaggatctgcagaggtagagagaaagagttaggagtagaaggaaggtcagtcgtgatttttgcttaaaaggaccacacaggtcgtaaggaacacttattgcattttgcttagtgatctccttgctatttgtgccccataaacctataagcacaggcagcacttactactccaatacagcgtcggtcggccccaaaccggtccaacaaagcgactcgcgacacacggcaatagcgtatcatagaaatgtcaagttgtagctatttgacaagtatccacacttgcgagtacctactgagttcatcttgctaaagcaagggaagactttagataaacattgcatgaaacgcgaaaaaggtagcttgattaataaggctccaccttgtactaaggaggatttacagtctttagtccgttacgtgtacagcacagcacgcgtgcacgccgactaccaagactcagcactcgcgtgcttatgtggcactgctttggccgatcttcggacctaggctacatccaaaaacagcacgtgtctgtatcggcagacggcaccttctacctgcggctgctacgtgtcaagacatcagaagaacagggtcttaccttgatcccggacaagagcgactttttgacgtgtcccttgcacgctctggccatagcgctagcgacgcaggacgcgccatgcgcggcactcctgtcccagttacccgatctcgtagcggaggtcgccgtgccacttgacgaaggtgtgccgctgctggagctgctggaagccgagcctgcttcgctcgacgtcgctgtggtcgtccctgccttcaatgctcgcggccagcaacgtatcctctgttccaccgccgcaaatctgcccggacacacaagaaacatcaacaccagccccaaccgaggcacgcaccggtgaggtcaagcgcggcgaagacagcgtgcaggcgtacgtgaacaggatgctcaagcgcgtcgccgagccggcaggagccacccctgacctgacctcgcactccttccggcgtggcggggctcagcatgcgaacggggatgaccgcctcgccgcccagtggatcctcgatcgcggtgcttgggatatgaccaaggcgaagaaggccttcgcctacatcactaacacggcacgcgaggacaggaaggtggcccgggtcttgagtgggtgggcggcagacgacgttccagcggtcatcgacgtcgcgacgcttgatcacgccagtcaagaacgcctcggccgattgcagggcttcctattcaattcctgtacaggtctcaagcaacaacgtctaaatgtaagcaccaaggtcatcagtgtcctcactgcgtacctggtccattactacccgcagctcaaggagctctcacccgcggcccccattgtcacgcgcgtggaagagagcttgcgtgctgcagacatcccgatcggcgacatgcttgcgtggtcagtcgcgcaggacagcgaagccgctccgcctgctcaagaacaaacccaaacacaagatgcaagccaacaccactgcccaagcatcgatcaccttctagctgtcattcatgagcttattgcctcaaacaaggccctagctgcgcggttgacgattgtcgaggcggctcagatgaaagctaaggagccgcgtagacccgctaaagaagaccaagcaaaggagcccaagccaaaacggaggaagaagcaagttacgctgcatggtacgagtggtacacccgtgttcctcgcgtctgggactgctctgaccgccaaaagaagtccgaatcacgccacgtcgttgccttcatgaagctgttcctcgaagacggctttacgcttgaccccacggttacagactacaaagatcaggtcttggacgccggtcgccgtgctgaagatgccgtgttggacttcctaaagtcgcggaacattaacgcgaagggcgctggcagtgttttgcgcgcgctgcgttccctgcacaagtgcagcgtcttggacaaacgcatcgcagcccacaaacgtctcctcgctacaagccgaattcaagaccctgctcctgcagacacacaggacatattagctttggctcgtcaagcctgaccggcatagtatcgggaattcccgaagtcgcaaaccgccgagcatacacagtcgagtaaacccgaaatcacgcaccgtcgagaatacccaaaatcgcccacagtagagtaaacccgaaatcacgcaccgtcgagtaaacccaaaatcgcccacagtcgagtaaacccgaaactgctgttaatgggagtaagcgacactcgcgagccaccgatgagcggcagctgtcaaaaagtagaatgactaaacagcatgcttctcaaacaatcatttatgggtcgtaattagtatattatgcattctgaccaataggatttaagaaatgtcatccaatgaaatgtaaggtacatgtcgagtttgtccgaaacgcgacacatcgattcttgccaagatgtcgagctcagatcagcggacgaatgcggagaagaccgagatcctgctcgcatgcgagcgaaatggatgggacgctaccgaggggggtcgtcgtcatggtgtggctcggacaaccttgctgggttggatgactaacaagcacaagttattctagtcccaggccgatccatcggcaaagcgggcagcgccaccaggcatggcccctccgacgcttcaatacgaggctggtattgttgagcgaatcaaggcaaaagtggcaaacggtcaggtggtgtgcagagatgatgttgtcgcggatgctgcgtcgacaatacctggctttggggagcgcaaacccgcggctcagagttcttggactacccggtttataggccgccacaatctaagcacgttcatctcacgacgactccagaataccggcacggcagcgccaaatgtgaatgaaccccccaacaagagacacaagcgtcaactatcgactttagccgaactcccccagcctccagccaagtcgactttggccgaaaaaaaccagccaccagccaagtcgactttgaccgaaaaaaccaagtcgccggaggtcatatcactgttgaatgatgacagtgagaaggccagcgttccatttgattttggagatgtgtgggatatatcgcagtccgagattgtgtgtgaagcacaaaccccgtgctttgttgtgggcaaaaccagcatgcgtttactggtgacagcggaagatgtccggacaattaaagaccaaaattggctgaacgatgtgattatgtcctattacatccgagtgcacctcccgcaacacggccgagcgtttggcatggatgcatacgtatttggacacatctacagcgagttcgttcaagtggagcgaaaaattggacttgcgcacgagcgctgttgcggtatcaccgcaacatttccgtacgagaagtacgatcacgtgattttacctatatgcatgagcaatcactggacgtttgccattgtgcaaaaccctgtaggcactacgcaatctgaggagatgccttgtgcatgtagactcgaaaggaatctccagcatcgaagcgattaaaaaagttgtcggtggatatttcgacgcggagctgcgaactaaatatcctgacaacgcagcaccagcgttcgtcgtgagaggagtccgaacaagcccggcacagataaaccacgatgactgcggagtgttgtgctatacttcatcaagcgcacggtggaggcatttcaaaccgggaatacgcttctcttaagcgatatcaagaagatatgcacaagtccaaggtccgcgcgcttcaacgcaaaactaatgcggaagagatcatagagagcctgacacaaacgcacgcgtaggctcactggaatacgggtctcggctaattcaatacatgtattagacgtatacatacaaaacgtcgctagtgccccaaaccttacagagaacagagattagcacaggagctagagcaccgcgcacccaaatgcagcaccgatatatacgtagaaggcgctactcctggcacgaccacagcgcgacaatgtgcgggcaaaacaacttgaagcacaacgcagacgcacaatctgtgacgcagcagcaagacccttggcacagcacgacacgaccgcaaaagcccattgtgatcaataacaccgacccaaattgaacgggcatctcagggtggaggccctgcgctcttccattgagctacggtgttgggagggggggggggcggccggccagttgtcttgtcttgggtgtggatgtgtgcgcggaggggtgcaggagacttgatcagtagctctaataaaaaggagactgaacgctctgagccgcgtgtcggcgacgtacaatgcctagcagccaccaatttcggacaggaggcgagtatctattggctgtagagagaaccaatcaacgatcatcgttaaatacatgtcccctattggctaatagattggccaatgggatgcctcaaatgagttagctggcgtcggactgcttctaattgtggccccctgtcctggagcaggcatcattaatgaatttgccggctccggcacacattggtcccggggccgcaatgcatgaatacacaaaataccgtttttcttggcctacaggcctctagaagcgatttcctcgcggctgagagcctctcatgaaagctgactgggtgccttccaaaacctagtctaaacggttcgatcaccccctatccctagcatcaaacagcgcatcaaaccgactgataaaaacgtgactaaatcgaattgtttgatgagaccgaaaagtggtctcaccaaacagttcattaaacagggtttgatcagtttgatgtgcacccctaaagcagcaaccgtatcaaaactacctttggttcactatggacacagacaacaccttcatttggaaatagctacttgaagttcaaacgaccctgggaagctgcgtttacgtgagcagtttcacggctttcatttaaggattcaccagctacagcacacggtgtcattattgcccaagccaggtcgtgccgcttttcttacgtgtacttaggtcttcgatatcactcgatccaagaagctgacagtttttagaatccagtgagagccgctgccatggcgtcctcggcggcgttcaaagtgcggctgagagtaggaggagggacgccgaacataatacagagtgccttctgtcccatagaccccacgtacaacgccatgagtagccccaacacctggtgatgatgccggagtttcttgggtcgaccacccctaggactgtaggtagtgatgttgtagaatggtgtaaactgctctagcaatcgtaggaaagcagagctagaaatggcgttgacacaatacccagcacaacgacagacagttagccccaatacgaaacttagtcccctagtgctaagtacttaccgggtgaggctggtaacgttgagcagattgccgtcgtctgcctcgttccagagcttcatccaggacgaccgctctgggctgagcaggcccttgacggtgaggtagtggcgcatctgcacgaggcgatcgtgctcgtaggcgatggttcgcctgcgaagaagcacacaatagcagcagcaggccgtgatccaccatcagtgtaagtctgttgtgctctgaggagacggagaagcggaggcgagagtgtttacctaacatgcgcacagtgggccgagctagctggacctcccccacgttggttgaagtaattgcaagatgcgggggacgaagatgcttttgcgcttgcaatatctctatatttcaacacttttctagaattttgtccacggtcctgttttcccctacagatgcccatactgaattgtatattagtgtgatcaatggtcaaaatagttcgaacggagctttaggttttatgaggtttcggttgttggtttaatgagccgtcagtggacatcaagacgtacaccctagccctcgacacagacgtcagattaaaccagaggtcatcaaaccgtttagactaggttttggaaggcacccactggaagcaccaaaatcgcccactagacctaatctaccgtatatattgtgttatttccgatcttacactatttccgattttgccctggctttggcctttatcctgtctgtcggaaaatgtagggatgtcggaacggccgcgatatggagtaatattcactctgttccaaccgctactcttttttgtaatcccaaaccgctcgtactcgacgactttcacccaatgaatgccttaagttcgatggattttggccaatcggaagcccctctaaactagggcatttttccaaccgttccaaccatatttggttggaattttgtcagaatatttttaatgccatacaaatgtctatagaaatgcatatccaaaaaatttccttcagtttccaacccgaatggtcggttcatattttttgttcagagtgaaaagagcaggcaggctagcatatcgatcgcatcgcttgctcctgccaacagcaagaagaccaggacgacggcgatcaactcgttcacgacgttcctggccgcggagagcatgacactcgaagccacccaccagctcatcgacggggataagacaggtaaggtattgcgtattaaactagacaagtatgcatattcgttagccacatcagccgaaaaggtaagagcgaccaatacgtgtctagcatactatggcaacgtcaagaaatggctagtagataagtacccactgcaaggagcttaagttaaatctcagctccaaaaaaaaactatctgggctgggtaagtattgtagcaaccgagaggaggtcggcgacgagaagaaagcacccccgtgctctaaacaagacttagaagctatggtgtctctactctactcaacggttgcgacggagagtgaatacctcgacgcggccctagtcgtgatgatgtggtacctttacggtcgaagctcggatgcggaaacagtcgaaaagagccagctatccatcttgcctggtaagtaattaattacgatgttcttagcagaattattttaacactgagggaatttatgctaggcggcgtcttatttcttcgatttaagcgggttaaaacagctttacttcaaggcatctccttattcaaggatccaacgaatttcttgacatgtcctctgcaagctttggctgtggcgctggttatgcagaaggcaccaagccagcgcatgttccctcagttcatcgccaaaaagcacagatcagatgatattgatgatgtacaggagcttacactgattgaactactggaagttgatgatgaccagccttctatggaggaatctgaagcaccttcgacaaagagggcagttcctggtgcacaagcatacgtcaacaggtttctggttagagttaaaaaaaactctccgatttgcgaagcattcgtatgacgccagatcttacctctcattcgtttcgacgtggtggggccatgcatgccaacgacggtaccttggcggaaaactggattatccagcgcgggggctggcagctggaccgcgtcaataaggccttcgggtacatgcttggtacaacccaagccgaccaaaaggtgtcccgcgtcctgtgtggctggaagcccaaggacggcgcgcggctaccaacgctagccgctctggaaccgcggtcgacgacggtcatgccgtcgagcccgaagagcaaaatgtagcggaacctctccgcattgagtgcgtacccagctctctaggattaagcccttggcgctttaattcggcggcaataccttcctcagctagcaaacgccgaaagcacttccgaaaccgctcgcactgattgttgcccgggaaaagaaggtcgcttgaatcaaatgatgtcgacgcccagtataatcccagcgcaacaatgggggcaaatagaaggctggagcgggtttgcgtaaatgtaccgaggatcccttggacgttccccgccttggtcgttcttcatgtgcgcgaagtacatctgaagtgcatcgcctctgcattccatatgcgagtgtcggatcccaaaggcattggacgagcgacgcatgagattccaggcaatgaccatgtacgcatgagaaaacgccatctccttgccaggaagagtatgcattttgccacacaaaaagctgtataaatcaaacatcagcgggtctttgcctgtcttggtctcgctggctccgatggacgcgtccttagctagcttgtgctttagccccttgaagtaggtggtcaactccgactcgagcgtcttgctcatggtatgaccgaagtcccgaaacaggttgaacaagcttgctctgtgcgtgttgagaacagagtagctgagtgcaccgccgtctttacgctggagtgtgatcagccaggtgacgaagacctccgcgtccaggagctcgaagacgaaagggtcgatgcgcggcttctggttgatcacctccttgatatgcgcctgtagctgttggagggagtacgcggcaatgtctccaagacgcgttgcaaactccggtgcgacgagatcggctttattcttggcaagccacgcgagaaagcgacagtaggagttctgataggtggttcgggagcgagctgtgactgtgttctcgcgaatctggcggacctggtcttttaaatgcccccaatcgtagccctccatttgcggttgtacttgtgtccgacgtcttctgtgctaatcgagaattgcgatcgtcgccacacgtttacacagggggcaaaaactcgtttttcagaaaatgtcggacgatgtgtccgactctttaccggattatggctacaaggtccgccaaattttggggaatgatattggggtcgtgaacgcctaaaataaagcgcctcgaggaccctaaaggaccctgggatgaacgttcatccgggtcgtaatatatatagggtccaacaaatcaacaaaagtcaaatcgttagggtcactaatccaacgatgcggcgagttcatgcgattcttacgcttcggcttcgctaactggcaagtctcacacatgggtaactctcgtttctttggcatcataacgtcaacgatgctcttgtccgacattgactgtaggtattgagtattcgtgtgcccaagtcgggcgtgccaaacacgaatatcagctagcccatccatcttcgtgaagttcacgacttctgtagcgcgcatcgcctgccgagagccatcctccgtaaccgagttgtaactacggaagctctacacgttgttcggctgcagcgttgcagctaacagaaacctatcaccgtcatacacgttgtacgcgcccgaacccggatcctgcacctctgtgagaccctggtctctcacaattcctgccgaaaacaaattccatcgagcgctcggaacttataacacccgatccaaagtaaacttcttcatctcaccattttctgacttcgttactagttcagcaacaccaacatcgactgcatgtgtcagcatattttgtgcaaacccacgacacggatccatcaccgtatccaactcctcataagccacgaaatactacaacgtgcctacgatgtgtgtacttgacgccgtatcatagtgccacaaaccagagtcatagtcatcctccagctcttggcggtcaggtagaacgtctacctccgacacaactggagctgtcagcacgggtaccaccgcgaaactcacactctgcttctttgcacctccacctccagccttctgctgattctggccgtgttgattctgccgttgcctgccactttcatcttgcacagcggatactgccgctggcttcgactccagcacaggacaaaaacgcctaatgtgcccaaattgatggcagttatgacactcaatctgcgacatgtcctgcttcttctttatccccttcttcaccgaacttccatgctgctcctaacgttaccagacttgccattaccactagcagtcccacgagcaccaaatacaccgccagcttcatccttaagctgtgcttctgccatcaaaatcaaatcacgaacttcctccggctttgactgacctccatttgtgccaattgctcgtacttgtcattcaggggcaaactgtaaagggcccaattgcataagtaggtagaagttacataggtacatacgcaaaagttggtgcagtgacacggctagcgtgtgacctgtagtcatgttctgattggttgaaagtggggagccagacccatttcatccaatcaggtgcaaactgagatttgaatggttcccaagtgtaagggggcctcctcccccgtcccataaataaacagagctgattttaccctaaagacaagacttgagcttattattgcgagctttctcttatctacagagtacccgagtgacggtatctcttaccccgttacacaaactatccagcaattcagagccaagcgagctcattggctaatattatgcctggggatacagctcatcgaggaaatcccctctaaagctgtccatcacttagtataacaaacccgattgggggatacagcttttcgaggaaaaaatgggggtacagctcatcgaggaattcggtagttggcatgcgccagagtgatcatgtgtgtcatggatgcccccgaaggcatgtgtgtggttgctgttgccgaccgagcgtgtatcgaggtcaagcgacgacgcagaggcgccgggatgagcagtgtttaggatggatggatggaattctggatttggatcgagatggagagctggtttggatccggatgggtccttgaatgtgcgaggggaaaatccagtggtcacccatcaagaaaggttccaaactccaagtatagtctggccaagatgttaacgaccgaccaacgcgaccgactaagatctgttttgcacgaggggtcgcctgattccttgcgtgtctccggatgctcaagatgattacgacacccggacccatagtgaaaccaagataaagtgaatcctgcatgtggaaagatagctagtagagatcgtctagcactaaaatcaacagagagttcgttttgccttgtgagtgacaagtcggccgaccaagcctcaagaagccattccccgggcccggcgacgcgtttcttgcggataaggtcacctcgggcacgcgtacgcccgttgtgcgagtctccactgcgacctagagatctaattggtggggaccacggcgacgcgcgctaaggagtgatccgccgtttcatattccagttggcgaaccgaacggtaacccatttcatattattaacttgaggtttgggaggttgttagtagtcaccccttgaacttgattgtgagactgctgtgtggtaggattgtatacctgtgtgtgaatcggttagtcttccggaacgaattctagtgttcggccccgggagtggtgcgcgatatagatttgagtaagccagtgagtttggagctggccagggttctgaactaggcttttttgactggaccgaagacccaccgctcaagggtatatctgtatatcgtgtacaactctctgtttgtattgattggtgtttggggacgaccccactaataggttgaccccccccccaaccgtactgactccgtttgggaacgaacgtggttgatttgtattattctgtatctgattgatattgtgaaagcagctcacgtggtgaactccggacctaccgaagataaacgctaccgaaagggattacacaaggtcacacgccaactccggtcgggatacttgtattccaattggagactgacccccagttgggttttccttttagactcgctcaacccctgggcgcgtaactatacaccctggacgataaaggcgttcacccgcctcacctcaaaagcgtaccgtcagactgacagattatgtcaccagttaaataatgtgacaactggtaagaaacccattcccttttccgcgatctattaagaaggcgcgggatagcgaatatgccgcgccgtgggagtgcgcaataaagacagagtttgaggccctactaaagaacggcacatggaagttagtgcctctaccagaagggcgacgagcactcggttgtcactgggtgttcgacgtaaagcaccattctgatggtacagttgaccgatttaaagcacggttggtagtccaaggggacacccagctgtacggcattgactacaagggagtatttgcccctgtagcccggtatgagtccctgcggcttttgctcgcactatctacagttttagatctacacctccattaaatggacgtttctactgcgttcctaaatggtgtactctaagtgacagcatctatgtgagacagccaatgggattccgggatggatccgagcttgtctgtaagcttgagaaacgtctgtacggcctgaaacaggcccccatagtttggtacgaagtagtaaatcgctttccaaaagatttaggcttttccagatgcaagaaagaacattgcttgtatctgaaaaggtgggaggctgaaggagtcacacacacactgatcgtgtgcgtctatgtggacgaccttacgatgactggctcactgacacgaggcggtccccaaaaaattgccgacgatgtgccgtcacctgatgacttggagtttgtatcggatgctgattggtggatgacttggatacggcgcggctgtacccgtgtgacatggatggcgactgtgggagagaagtgatttctcgggatgaatccagcgcctgactgcagatgggcccaactggctggaagtgtgaatcctgggagtgcacgcccaggattttagagaacactcagtccagccgcggactctcccttacgatgagtgcctaaagtctgctggaaagtgtctctggagaatgtatcccagagtacacctcatcttgctgtggctcagagtgccccagagggtcaaattaccctgataatcaacccactaccaccatgatcatgcgcaggaggccgctaaacccgctaaaagctttgctttgtggagatgcccgcaggcctgcaatgtagcagatttgttacccagagtgctgcacggaaacccagagttcacctccctgagtacaggtgacccagagttccaagatgattccctgggtttggatcaagaatccagactctccatactgaacttaagtgtttcccaagccaacacccaagaatcccccagttccccaagattcctcagaattcccaggatttcagaagatgaccctgagtgtcacctgattttcagggattcgagtcagttcgaagtcagtctgcaatcaaagtgatgcgtggccttgaagaaccgttatggatgcgcagactggatacgttcgaggagtcgagagggagtcctacaccatactaaaccaagtctaaggacccacaattggcactttcgacgccgtgcgacaatggattcgcaagccgatcgcaagtttggaccgctgaacccaagttatactcaagacaagacatttgaccccaagcatagtgaacagaagatttttgcccgaagaagtaagagaaagagagagagagggagagagagagagagagagagagagagagagagaagtagctgataaaaaccaaacagatttcaatttcccctgtactgcgcaagtgacttcggccaagcctgccgacggaaatccggaggacccgagactacgatcgcgtgacggtaagggcacatcaacggtaaaggacagccgtctgtgtggactccatcaactcaagtccagttaggaggggaccagcgacggccttgagcttcttggagtaatccatctattccatatcctagttgggtcacttgctgtgctcgtggtagcccatttcataatatcccagagggtattctggggtgctaggtagtcgcctccaggattttgtattgactgcttgtgtgaagggaaggtaactgatattgattgtattttcctcctttattggaggtggtgcgcgtttgcgtgagtctcaggggagctagacccctgaatttcagactcgagtgagcctagtgtgagtgtgacctaccgtccaagggtccaaaagaataagagacggctagttgtagtgtttgtatactctgtatttgttggttttattgagctaggagagcatttgggtaaggtgtcttctgagttccaagtcccagagttgactgaaatcctggaccctgaattcgtgatattctgggattcagggtgcagcggggctgccgtagctttgcgtcagaggaagcttaacagactcacagagtctcagcttaagatagcccgttctaataccagaacgtacgagtccgtacacctcacggactccaagagtcaacccttaacacttaactgtgtgaacctcaaactgcatgtctttccctttatcgcggccaagccgcctacggtgtaaatgtatccggttcactatctagcatagtgaaccctagtcatatgcataatcagtggctctgaagccgtgtaccgattctcctactgatttaggttagacaatgtgtatccacttcataacccttcgggtaactctcgtgtaaccccgttaccccctcccacccacccaccaaaccgtggacacgggtgttcacgcttaacggtcaacctccgggtcttgttccgtcaagcctccctctcgaacgagtcaatccacgtcgcgtggacgtctctgagaacttctcggtacaacgcgccctcacatgacttcaagtcataaagccttttggtctttcgaccgtcgcgagatccgcctcggagccttgctcctctcgtgctgctgcactgcgtgcctccgcacctccgcgaacgcccgtgcccgcgcccacaccctcgacgccttccaggctctcggtgtccgagtacttcacggtgcaacgcctgaagcgcagctcgcagcgcgcaagccccagctctcctcgagcaccaacccgccagatcatggatcgtagggaactctttggtaaagagggcgaggtggacgagtccatggagggttctacgaaccgaggagacgcgtccccctcacgggacgctccccgagccgcggcgatgcttcgcccacaccgtcgacacgttgtgaagaaggctcgccggccccagttggctcttcgagccgtcgcgaccaagagcgcgctgcgccgtcgagggaggagccgcggccaccactgcgaactccgaaccggttccctgaacgctcttccggtctctacgagctgcgcgcgctcactgagccacggtattcgccacctcgtggtgagggcgtgcccctgggccccgtcatctccaaccctttggaccaagctcagtccgagcaggtggcggcgcagatggctcccatgcgctcccagcgccccgagctgcggcctctgctgaatcccggcactgccgactacggcttccggcctcgcgaccccgcggaggcttgtcgccaggcgttccagcagtctctcgcgctgcacaccattgggcccgcggcccgtactccggaggagcttgcactgcgtacgtctctgcgagagcggctcctcactccacagtctacgactgtcgcggagtatcgcgagaggctgcggctgcaagcccagcagaagcccgtgaccgccatgcggacgtacccggtggtacttagccggggggaagactcaattgagtacgaagctcagttcgagtcttgggccgagcacagccgaaagcttagctccatggacgctctccgagccagcttcagtgaagtggatgttcgcattgaacgctagctccacttcgatttcgcgaaggtccgagccaagcgcagccttccggcactcgcccagccaaagacccagtttagcgctgcgcgcttcgctccttcgagcactccagccactccttgccgcgagggagtgagcgctgtggctcagggtcagcctcggagcaatgtggctgacttagcagctccccagcttattgccgggaagcgcgggacggccggcgtgccggccttgagccctcggggagctggtgatcaagctgatcaaaagcgtccacgacgtctgggcagtcttggtggaggggcacctcaaactcccatgagttctcggagtgaaggtaccctcgccatttcaccagatactggttttgactctggcaccgccgcttcgccaggaggcgctccacatggtaatgtagattcccatgctcatcgagcagggccggtggaggccgctgtggggccctttgcgactcaaagtgagctcttggaggtgcgacagcaggcgggtcgccttcgggatcatatccatgacgttgatgcgcgtctggatcggactgccaccgaacttgacgagctcgccgagcggacgcgatggatcgaggtgcctcgagcggtctgggaccgccttggggccctggaggactgggtgcgatactatcgcgatcgcgatgagcaacgtggccgggagctcggggagctacagcgtcagcaggctgtgcttcagggtcagctcgacctccgcgcctgtgacctcgtcacccttggcgcctccatctgcacctgcatcaggtcctggtacggcttgagcaagcccacgtagaagacgggtgcgtcctcatcttcttcggaagattgagcgtgtacgcaaggcccttcttggccacaaccttgaaaggtccgatgaagcgcgggcgcaacttcgtcttgaagacggcagacactgcatgtgtagataggtccttagcattaagcagcaccaggtccctgacctcataactttcaacattgcctctgcccctggcatctgcatgttccttgtgcttgtcttggctctcagccattgcgtcacgcacatgttgtaagacactcagacgcgtcgacaagaaagcttcaacctgtttacgaacagtaaccgggctgacatcagctagccgatcagctaaatcagcttctccccccaccaagcccgaggccaccacgtggcggcgtcagcgggacgcggacaatgagacaagctgttcacgtagaacggcgtgtagcctgtcgaggcgtgcacggcgttgttcaacgcaaactcaacgagtggaagcatggcgctccagcgcttcggcgtctcggcgcaaatgctgcggagcacgtcctcgacggcgcgatttacgcgctcggtctgaccatcggtctgcggatggtccgccgtggacatgtccagattggtgataagcaccgcaaagaccgcgctccagaagttacatgtgaagcgggggtctcggtccgagacaatcgactcagggagtccgtgttgtcgaaacactcggtccaagaacagcgttgctgtacctttaccatcgatggtctccggcacagccgcaatgtgagccatcttgctcagtcggtccacgaagaccacgactccagtgttacctgccgcttcctccggcaggccaaacacaaagtccatactcatggattgccagcagcccgaagggacaggcaaactcgccaacggcgctgcagcatgaggagacgacttcactcgctgacacgtctcgcacgtgcacacataagtgctcgtccacttgtacagcttcggccaccagtagtgggtgctcaccgaacggtaggtcttctcacggccaagatggcctgccagcagcgtgtcgtgtgcctcatagaggatgcgatacttcagatcctcatcatgagggatgaccacgcggggcgtatcctcggggccggtgttgtagagcaacaggcctccatcgagggaataacggtgtagccgcgcgcgcagccgcgctgacaattccatgtccgagtcttgaaacaccttgctccccagagccttcagcaacgcgacacaagtgtcgtccttggcataagccgttcggatcaaatccggtaatgacgaagtcacggtcgttacatgagccagctcataatccggagcgcgtccgcaaggacattctgcctgccaggcttgtacttcacctcgaagttgtactccgcgaagaaggacagccatcggaccatcctttgcgagagatgaggcgactgagtcgcagtgcgtaacgacgcatgatccgtgtaaatcacgaacgactgagagcccaacaggtgatccctgaacttgacgagcgcatacttcgttgcaagtagctccttgtcgtggacaggatagttcttctcagcagccttcagctggcgagattcgaacgccaccacgcgctcgcgcccctcggcgtctgcttgcagcagggcacagccgatgggaaagtccgaggcgtcacagacgacactaaacgaacgagcggggtctggcagagccagaataggcgcatgaaggagactgtccttaattgccacaaacgcatcttgatgctcggtgccccaacaccacttcgcatccttcttcaggagattggacagtggccgagccatctcagcgtagttctcgctgtacttgtgcaagtaattggccaagccaagccacttgcgaagatccttctggttcttgggaaccggccagtcaacaatggccttgaccttgacccggtcggccctcaggccacgcttcccgatgaaacaccctaagaaggggatctcttccgctccgaagatgttggtgtacaacttgttttgacgcatgcattcgagcacagcacgcaggtgctccacatggttctccatatcagtctttccgtgctccgcacgactgtggacaaagatgtcatcgaagtgcgtttgcgcgtacgcccgatggggcctgaagagctgcgtcaccagacgattaaacgtcgctggcgcgttcgaaagcccttggggcatcaccaaacaatcccagagcatgccgctcggagtactcaccgcagtgagagggatgtcgctcgtcctcatgagcaattggtaatacccatcgaccaagtcgagcgcactgtacatcgtacatcctgtcatgttgttctgaagaccatccttccgaggaaacggcgtctgtgccggaatggtagcggcattcagcttgttgaaagcatgcacgatacgccacttgccattcggctttctgacacagaacgtcggcgtagagtgtggagacttactctcacgcaccatgcccgcctcgtgcttcgcacggaagaacgcgtcaatgacgtcacactgctccttcggcaagggccactgcctcgtcacgcagtacttcgtccccggaacgagatcgatttcgtgtcgaacacctcgagccggaggtagccccgagggcggctccttcgagaccacgtcctggtaatcctttaccacttgatacatgggatccgacgggtccttcaggatcgccgatccgctccgcgcattcagcgccttcttggtgtcttccaggacagcttcatccagaagcgaggacgagttcaactcttcttcgggtcgtatgagcactacctcggccaagtctccagccttcaaggcttcgccgaactcggccaaggacatctcgctcagctacaggagagcagacagtgagggcaagtcgtcgaggttgatacctccgtcgacgtcgcccgtcactccattcacgagtgtgtagagttgctcgctctcgcgtggagcctcgccgctcgacacgcccttctcgacttgtgagattgcagacgccttgcgtctcgcagccagcgctttgcggcgctgcctcctcttcatggacaccgtccgccctgtagagctccgtgatttcgcgtgcgtcttgacgccaggtgtcaccacctcgttcagctccgagggagctccagtgtctttaccgacactcagcgaagagctgtacgatccgcagcctccactcagtggattacgtgccactccacgatcttcatccgggcaaagccccttgttcttcggcatcgtgccgaccgcgccgtcgctggcacgcagcagggcgtcgccctcagacgcacacccgctcagcggaattcgtgccgctccacttgccgtccgcgagccacgctcggaacgctcgttctcgacacactcagtgtccaccaactcggaaactccgatgtccagcacatcgaccgactcggcccagtgctcgcgccaaaagcgcttctgcttcctagcagaggtgggttcatgactcgccaatgctccgccaagagagaagtgcgtagcaccaagggtcttcgacctccaatcgatccaaggctcatggcgttctagccacgccataccaaggatgagatcatgtctcgaatcgaggtctaagaccagacagcgttccacgctatcaaaatccaaaaacttcacgcccaggtccacagggaccttaggcaccgtgacacgagtgcccgtcgcgagacgaatagtgacgatgtcactcccgcgcgctaccagcgcctcagcataaagctgacttccgtccatcatagaacgccgggcgtagttacccgacgctcccgaatcgatcaaaatcatccatggcttggtgaagcccttcacccaagcttggacaactagcaagcccgacttgcatacacgttccgtgttagagagtacggctctcttcggggctaagtcctgtcgacctccacctcgccgaggctcaatagaacttagttcttccccagtaggccgccccgcgcctactgggacttctcgtttccccgagacaaaccagagccctggctcgatctcgaagagcggcttgacgaagcctggcgctgatggcgcagcggacacccagcatgaaggtgacgggtgtcaccacagatgaaacatctgcggataccgcgacgctgctcagcagcacgaagctcggcttcttcgtcttcagcatagctgaggtccatgggttccggaccactcgacgcgctagcgtaagacgcactccacccaagtctcgatgacttaaagttgtgttccgcattcaatgcgacgctcacagcctcttcaaaagagctcggccgggttcggaacacctccgtcctggcaacgccagtgcgaaggccttccatgaacaccgtaacggtgactgcttccggcagtgggtccgcagacatgccagcaatgagagttctcaactcttggacatagtccactaactccttcttgctctaccgagtagccaggaagcgtgagcgcacgcgatacgccccgttaggcggagcgaacacccgggacaattgctgtttcagctggtcccacttcgggaaggccacctcgaccgacgtcccggacgttagtgcccactctctcgctcgcccaccgagcttcgagacagctactgccacgcgctgcgactccgtccggagtagagctgagcacatagccatctcaacctcacgggtccaaagcatcaagctttcaccctccttgccttcgaacgtcttcacgctcaacatgagcggcttgggtcttgttctcgcgtcggatgatgaagcgggcgcttggggcgccgcggccgttgccatcctctgctggaggtgctctagcagagcattctcgtagcttgaaaacgcttcgagatgcgcattcaccgcgtcggggccttgctgcgcaagttgcgtcacgccctccgggcccagcaaagacataagctttttaagcgcatcctgctggttcgggagcaagtgagcgaactcctccattctccatagagggtccgtctatacagactcaggtgtcggattgactacaagtgctaccaagtgcagcggggctgccgtagctttgcgtcagaggaagcttatcagactcacagagtctcagcttaagatagcccgctctaataccagaacgtacgcgtccgtacacctcacggactccaatagtcaacccttaacacttaactgtgtgaacctcaaactgcatgtctttccctttatcgcggccaagccgcctacggtgtaaatgtatccggttcactatctagcatagtgaaccctagtcatatgcataatcagtggctctgaagccgtgtaccgattctcctactgatttaggttagacaatgtgtatccacttcataacccttcgggtaactctcgagtaaccccgttacaacctggttcctgggagcctcgtaatactccagcaacgccttccacatatctgtgcccgtcttcttcttctttttcttcatcaccctttgcgccaaggcacgggacacagaacctgcttcttcttccacaccatgcgcacattgtcgtcagcgtcctccttcagagtcttctcctcggagcccatcagctcaaggcccttcagccgcagaaacgagacctgtctatggccggcggaggcaacagttgcctctatttgtacaaatagtacgtggtggcgtcgtactgctgcgaagggttgaagtcggtatatctaacgctgggtgttgttattgtgggtcttccagtcattacccgctatcgaggacggtcgacgcttacaaacgactgtacggcgtacgcggcacagtcgagctgctgaacttgcgagtgctttcgactcagcctattgtcagcatagaatggaggtacgcaacgaaaacctatatccattcaactaaaatgctcgttgctaactatttggttgctgccgttgttgttttacagcccgtctacatcgtcacgaaaaccagcaagtgctatcgcccgcattttaacgaacaggacacgaagataatctatgcgccgatggcttattccaccgctacgagctctgccggattcacgtcagtcacgatattttagtttcgaattcaactttgattcaaccattctagtgtctatcttgcaggtgtttgcacaatatataccccgatacgcataccgaagatagatacacggtaacgagccctacaaataatgtgattaatatattattttgaaagataatgagcactttagcaggtattatctccgtctaaggcatgaagtgttggaatcggattgttgcgtgctgcaattgtacgtagttgtgtagttgctgtaagtttcggatgtgatggcaatgaattcctgcttccttcacatccctcggcttatcatattgctgccagcagcgctggctcctttccctttgaatggctcttaatgccctttgtattatccaatcagatgccctaaaacatatcatttgattcttacttcatttcactatagcatacaatacagtagtgaatatggcgcaagactcccactaaagatgccagcgcgcctctcgaaagatcgctctcgaccattcgacttcaacgccgttcttagattttttcgtgtcgcatacccaaaattaaattatcaggttgcccaagatacttttatcataagcagtacagatacccaatataaatcagatctgcccaaactaagagtcatattttatcttgtatattggagagagcacctttcccataaagctccctccgcccgttgcctttgctcctgactctctcttctgtctccgtgccgcgcaagtgctggtctgacgcaaacaccgcaatggggataccgtaagccattcatattctcttggctacagttgtgtgacctaggccacaaagccctggaggttcgcatgcagccaacaggcaaactggggaccctgtgaatggaaagtctcattgttttgagctactcgcggtcatccagtctatgatcactgcacttttccgccggcggcagatgagagagtcagactgaaaataacttaaagtttagtaaaaggtactcaagagtgcgggccttgcagcccagaccggtagggagcccatgattagggttaggttgcacctaaaagtaaggttttagcccttaaagtgacctttatcttaactttgctgtaaatctttgccttggttgtgcactttaataaatgttttgtccttttacagttcttatgttgaaaaattgtttctttatttgtgtcttaccaaaaattacctttggcacaaagtcccaccttatttgtgtctgaaaacaattatttgtggtgcaaagtattttatttatcgcggtgtagtttatcggtaagcttacaccttaaaattctttacgcctatcatcgcgcgaagttttttaaattgacttcgagtctgtggctttgtgagtgcatcttaacatatcgttggtattacagtaagtaatactgatacttttctcttcatgcttatcgcgggcatagagacgcctgataccagtgtgttttgttgacgaatgattgcatgggtcctttattatactaattgcggtattgttatcgcaccaacactgtgttggccgtgcttggccgtaacccaactcatgcaatagtagtcgtaaccacattgcctctctaacaccttcacttgcggctactaattccgtttccgcggttttgagactaatacagtcttgcttaacactcttccaagtaattcatgcaccagcaagtattgatacatattctgtaattgatttcctttgttcatttgcactcacaaagctcgcgtctgtttatagctctaccttaatagtgctatttgtattgtactctaagcgatacttcgacgttcctttcaagtactttagtactcgctgagccgctcaccaatgggtcttattatagcaagataagtacttgctcaacactcttacagcgtttgctatatcaggtctagtgtctcttactaaatacattaatgagccaatcagacctcggttatcaaacggctgagccgctatctattcgggtgtcatatttgtttcattttctaaaaccacacttttagcttgtgctgtcggctctgtgttacagtccctcatctgaaacttttccaaaaggtcctgaatgtacttttgttgcgatagacgcagtgttttcctttttagatctctttggatctccatttttagtaaatagtgcaatttcgcctaaatctttcatagtaaacttagcagacatcttagttttcagatcattgatcgagctcaagtgtgatgaggcgaggccgatgaaacctttatcgccaggggggggggggtcgtatagcgcagcccaagactgttccccagggtgtagacccagagaatcgacttgagtgtcaacagcaagaagattgacccagatattcgcagccacaaagctttaacccctgagaaagacactccttggttggcgtgggtaccgtgtaatccctgtcggctcgtttgtcttcgacggaacggcactccaccggttgacaatgtagcctcgaacaagtgcgggagcgcacgtctacttcagaacgcacctccacaccaaaaagcaaccccagagaatcagatcccctgtgtaacggggttacacgagagttacccgaagggttatgaagtggatacacattgtctaacctaaatcagtaggagaatcggtacacggcttcagagccactgattatgcatatgactagggttcactatgctagatagtgaaccggatacatttacaccgtaggcggcttggccgcgataaagggaaagacatgcagtttgaggttcacacagttaagtgttaagggttgactattggagtccgtgaggtgtacggacgcgtacgttctggtattagagcgggctatcttaagctgagactctgtgagtctgataagcttcctctgacgcaaagctacggcagccccgctgcacttggtagcacttgtagtcaatccgacacctgagtctgtatagacggaccctctatggagaatggaggagttcgctcacttgctcccgaaccagcaggatgcgcttaaaaagcttatgtctttgctgggcccggagggcgtgacgcaacttgcgcagcaaggccccgacgcggtgaatgcgcatctcgaagcgttttcaagctacgagaatgctctgctagagcacctccagcagaggatggcaacggccgcggcgccccaagcgcccgcttcatcatccgacgcgagaacaagacccaagccgctcatgttgagcgtgaagacgttcgaaggcaaggagggtgaaagcttgatgctttggacccgtgaggttgagatggctatgtgctcagctctactccggacggagtcgcagcgcgtggcagtagctgtctcgaagctcggtgggcgagcgagagagtgggcactaacgtccgggacgtcggtcgaggtggccttcccgaagtgggaccagctgaaacagcaattgtcccgggtgttcgctccgcctaacggggcgtatcgcgtgcgctcacgcttcctggctactcggtagagcaagaaggagttagtggactatgtccaagagttgagaactctcattgctggcatgtctgcggacccactgccggaagcagtcaccgttacggtgttcatggaaggccttcgcactggcgttgccaggacggaggtgttccgaacccggccgagctcttttgaagaggctgtgagcgtcgcattgaatgcggaacacaactttaagtcatcgagacttgggtggagtgcgtcttacgctagcgcgtcgagtggtccggaacccatggacctcagctatgctgaagacgaagaagccgagcttcgtgctgctgagcagcgtcgcggtatccgcagatgtttcatctgtggtgacacccgtcaccttcatgctgggtgtccgctgcgccatcagcgccaggcttcgtcaagccgctcttcgagatcgagccagggctctggtttgtctcggggaaacgagaagtcccagtaggcgcggggcggcctactggggaagaactaagttctattgagcctcggcgaggtggaggtcgacaggacttagccccgaagagagccgtactctctaacacggaacgtgtatgcaagtcgggcttgctagttgtccaagcttgggtgaagggcttcaccaagccatggatgattttgatcgattcgggagcgtcgggtaactacgcccggcgttctatgatggacggaagtcagctttatgctgaggcgctggtagcgcgcgggagtgacatcgtcactattcgtctcgcgacgggcactcgtgtcacggtgcctaaggtccctgtggacctgggcgtgaagtttttggattttgatagcgtggaacgctgtctggtcttagacctcgattcgagacatgatctcatccttggtatggcgtggctagaacgccatgagccttggatcgattggaggtcgaagacccttggtgctacgcacttctctcttggcggagcattggcgagtcatgaacccacctctgctaggaagcagaagcgcttttggcgcgagcactgggccgagtcggtcgatgtgctggacatcggagtttccgagttggtggacactgagtgtgtcgagaacgagcgttccgagcgtggctcgcggacggcaagtggagcggcacgaattccgctgagcgggtgtgcgtctgagggcgacgccctgctgcgtgccagcgacggcgcggtcggcacgatgccgaagaacaaggggctttgcccggatgaagatcgtggagtggcacgtaatccactgagtggaggctgcggatcgtacagctcttcgctgagtgtcggtaaagacactggagctccctcggagctgaacgaggtggtgacacctggcgtcaagacgcacgcgaaatcacggagctctacagggcggacggtgtccatgaagaggaggcagcgccgcaaagcgctggctgcgagacgcaaggcgtctgcaatctcacaagtcgagaagggcgtgtcgagcggcgaggctccacgcgagagcgagcaactctacacactcgtgaatggagtgacgggcgacgtcgacggaggtatcaacctcgacgacttgccctcactgtctgctctcctgtagctgagcgagatgtccttggccgagttcggcgaagccttgaaggctggagacttggccgaggtagtgctcatacgacccgaagaagagttgaactcgtcctcgcttctggatgaagctgtcctggaagacaccaagaaggcgctgaatgcgcggagcggatcggcgatcctgaaggacccgtcggatcccttgtatcaagtggtaaaggattaccaggacgtggtctcgaaggagccgccctcggggctacctccggctcgaggtgttcgacacgaaatcgatctcgttccggggacgaagtactgcgtgacgaggcagtggcccttgccgaaggagcagtgtgacgtcattgacgcgttcttccgtgcgaagcacgaggcgggcatggtgcgtgagagtaagtctccacactctacgccgacgttctgtgtcagaaagccgaatggcaagtggcgtatcgtgcatgctttcaacaagctgaatgccgctaccattccggcacagacgccgtttcctcggaaggatggtcttcagaacaacatgacaggatgtacgatgtacagtgcgctcgacttggtcgatgggtattaccaattgctcatgaggacgagcgacatccctctcactgcggtgagtactccgagcggcatgctctgggattgtttggtgatgccccaagggctttcgaacgcgctagcgacgtttaatcgtctggtgacgcagctcttcaggccccatcgggcgtacgcgcaaacgcacttcgatgacatctttgtccacagtcgtgcggagcacggaaagactgatatggagaaccatgtggagcacctgcgtgctgtgctcgaatgcatgcgtcaaaacaagttgtacaccaacatcttcggagcggaagagatccccttcttagggtgtttcatcgggaagcgtggcctgagggccgaccgggtcaaggtcaaggccattgttgactggccggttcccaagaaccagaaggatcttcgcaagtggcttggcttggccaattacttgcacaagtacagcgagaactacgctgagatggctcggccactgtccaatctcctgaagaaggatgcgaagtggtgttggggcaccgagcatcaagatgcgtttgtggcaattaaggacagtctccttcatgcgcctattctggctctgccagaccccgctcgttcgtttagtgtcgtctgtgacgcctcggactttcccatcggctgtgccctgctgcaagcagacgccgaggggcgcgagcgcgtggtggcgttcgaatctcgccagctgaaggctgctgagaagaactatcctgtccacgacaaggagctacttgcaacgaagtatgcgctcgtcaagttcagggatcacctgttgggctctcagtcgttcgtgatttacacggatcatgcgtcgttacgcactgcgactcagtcgcctcatctctcgcaaaggatggtccgatggctgtccttcttcgcggagtacaacttcgaggtgaagtacaagcctggcaggcagaatgtccttgcggacgcgctccggattatgagctggctcatgtaacgaccgtgacttcgtcattaccggatttgatccgaacggcttatgccaaggacgacacttgtgtcgcgttgctgaaggctctggggagcaaggtgtttcaagactcggacatggaattgtcagcgcggctgcgcgcgcggctacaccgttattccctcgatggaggcctgttgctctacaacaccgaccccgaggatacgccccgcgtggtcatccctcatgatgaggatctgaagtatcgcatcctctatgaggcacacgacacgccgctggcaggccatcttggccgtgagaagacctaccgttcggtgagcacccactactggtggccgaagctgtacaagtggacgagcacttatgtgtgcacgtgcgagacgtgtcagcgagtgaagtcgtctcctcatgctgcagcgccgttggcgagtttgcctgtcccttcgggctgctggcaatccatgagtatggactttgtgtttggcctgccggcggaagcggcaggtaacactggagtcgtggtcttcgtggaccgactgagcaagatggctcacattgcggctgtgccggagaccatcgatggtaaaggtacagcaacgctgttcttggaccgagtgtttcgacaacacggactccctgagtcgattgtctcggaccgagacccccgcttcacatgtaacttctggagcgcggtctttgcggtgcttatcaccaatctggacatgtccacggcggaccatccgcagaccgatggtcagaccgagcgcgtaaatcgcgccgtcgaggacgtgctccgcagcatttgcgccgagacgccgaagcgctggagcgccatgcttccactcgttgagtttgcgttgaacaacgccgtgcacgcctcgacaggctacacgccgttctacgtgaacagcttgtctcattgtccgcgtcccgctgacgccgccacgtggtggcctcgggcttggtggggggagaagctgatttagctgatcggctagctgatgtcagcccggttactgttcgtaaacaggttgaagctttcttgtcgacgcgtctgagtgtcttacaacatgtgcgtgacgcaatggctgagagccaagacaagcacaaggaacatgcagatgccaggggcagaggcaatgttgaaagttatgaggtcagggacctggtgctgcttaatgctaaggacctatctacacatgcagtgtctgccgtcttcaagacgaagttgcgcccgcgcttcatcggacctttcaaggttgtggccaagaagggccttgcgtacacgctcaatcttccgaagaagatgaggacgcacccgtcttctacgtgggcttgctcaagccgtaccaggacctgatgcaggtgcagatggaggcgccaagggtgacgaggtcacaggcgcggaggtcgagctgaccctgaagcacagcctgctgacgctgtagctccccgagctcccggccacgttgctcatcgcgatcgcgatagtatcgcacccagtcctccagggccccaaggcggtcccagaccgctcgaggcacctcgatccatcgcgtccgctcggcgagctcgtcaagttcggtggcagtccgatccagacgcgcatcaacgtcatggatatgatcccgaaggcgacccgcctgctgtcgcacctccaagagctcactttgagtcgcaaagggccccacagcggcctccaccggccctgctcgatgagcatgggaatctacattaccatgtggagcgcctcctggcgaagcggcggtgccagagtcaaaaccagtatctggtgaaatggcgagggtaccttcactccgagaactcatgggagtttgaggtgcccctccaccaagactgcccagacgtcgtggacgcttttgatcagcttgatcaccagctccccgagggctcaaggccggcacgccggccgtcccgcgcttcccggcaataagctggggagctgctaagtcagccacattgctccgaggctgaccctgagccacagcgctcactccctcgcggcaaggagtggctggagtgctcgaaggagcgaagcgcgcagcgctaaactgggtctttggctgggcgagtgccggaaggctgcgcttggctcggaccttcgcgaaatcgaagtggagctagcgttcaatgcgaacatccacttcactgaagctggctcggagagcgtccatggagctaagctttcggctgtgctcggcccaagactcgaactgagcttcgtactcaattgagtcttccccccggctaagtaccaccgggtacgtccgcatggcggtcacgggcttctgctgggcttgcagccgcagcctctcgcgatactccgcgacagtcgtagactgtggagtgaggagccgctctcgcagagacgtacgcagtgcaagctcctccggagtacgggccgcgggcccaatggtgtgcagcgcgagagactgctggaacgcctggcgacaagcctccgcggggtcgcgaggccggaagccgtagtcggcagtgccgggattcagcagaggccgcagctcggggcgctgggagcgcatgggagccatctgcgccgccacctgctcggactgagcttggtccaaagggttggagatgacggggcccaggggcacgccctcaccacgaggtggcgaataccgtggctcagtgagcgcgcgcagctcgtagagaccggaagagcgttcagggaaccggttcggagttcgcagtggtggccgcggctcctccctcgacggcgcagcgcgctcttggtcgcgacggctcgaagagccaactggggccggcgagccttcttcacaacgtgtcgacggtgtgggcgaagcatcgccgcggctcggggagcgtcccgtgagggggacgcgtctcctcggttcgtagaaccctccatggactcgtccacctcgccctctttaccaaagagttccctacgatccatgatctggcgggttggtgctcgaggagagctggggcttgcgcgctgcgagctgcgcttcaggcgttgcaccgtgaagtactcggacaccgagagcctggaaggcgtcgagggtgtgggcgcgggcacgggcgttcgcggaggtgcggaggcacgcagtgcagcagcacgagaggagcaaggctccgaggcggatctcgcgacggtcgaaagaccaaaaggctttatgacttgaagtcatgtgagggcgcgttgtaccgagaagttctcagagacgtccacgcgacgtggattgactcgttcgagagggaggcttgacggaacaagacccggaggttgaccgttaagcgtgaacacccgtgtccacggtttggtgggtgggtgggagggggtaacggggttacacgagagttacccgaagggttatgaagtggatacacattgtctaacctaaatcagtaggagaatcggtacacggcttcagagccactgattatgcatatgactagggttcactatgctagatagtgaaccggatacatttacaccgtaggcggcttggccgcgataaagggaaagacatgcagtttgaggttcacacagttaagtgttaagggttgactcttggagtccgtgaggtgtacggactcgtacgttctggtattagaacgggctatcttaagctgagactctgtgagtctgttaagcttcctctgacgcaaagctacggcagccccgctgcaccctgaatcccagaatatcacgaattcagggtccaggatttcagtcaactctgggacttggaactcagaagacaccttacccaaatgctctcctagctcaataaaaccaacaaatacagagtatacaaacactacaactagccgtctcttattcttttggacccttggacggtaggtcacactcacactaggctcactcgagtctgaaattcaggggtctagctcccctgagactcacgcaaacgcgcaccacctccaataaaggaggaaaatacaatcaatatcagttaccttcccttcacacaagcagtcaatacaaaatcctggaggcgactacctagcaccccagaataccctctgggatattatgaaatgggctaccacgagcacagcaagtgacccaactaggatatggaatagatggattactccaagaagctcaaggccgtcgctggtcccctcctaactggacttgagttgatggagtccacacagacggctgtcctttaccgttgatgtgcccttaccgtcacgcggtcgtagtctcgggtcctccggatttccgtcggcaggcttggccgaagtcacttgcgcagtacaggggaaattgaaatctgtttggtttttatcagctacttctctctctctctctctctctctctccctctctctctctttctcttacttcttcgggcaaaaatcttctgttcactatgcttggggtcaaatgtcttgtcttgagtataacttgggttcagcggtccaaacttgcgatcggcttgcgaatccattgtcgcacggcgtcgaaagtgccaattgtgggtccttagacttggtttagtatggtgtaggactccctctcgactcctcgaacgtatccagtctgcgcatccataacggttcttcaaggccacgcatcactttgattgcagactgacttcgaactgactcgaatccctgaaaatcaggtgacactcagggtcatcttctgaaatcctgggaattctgaggaatcttggggaactgggggattcttgggtgttggcttgggaaacacttaagttcagtatggagagtctggattcttgatccaaacccagggaatcatcttggaactctgggtcacctgtactcagggaggtgaactctgggtttccgtgcagcactctgggtaacaaatctgctacattgcaggcctgcgggcatctccacaaagcaaagcttttagcgggtttagcggcctcctgcgcatgatcatggtggtagtgggttgattatcagggtaatttgaccctctggggcactctgagccacagcaagatgaggtgtactctgggatacattctccagagacactttccagcagactttaggcactcatcgtaagggagagtccgcggctggactgagtgttctctaaaatcctgggcgtgcactcccaggattcacacttccagccagttgggcccatctgcagtcaggcgctggattcatcccgagaaatcacttctctcccacagtcgccatccatgtcacacgggtacagccgcgccgtatccaagtcatccaccaatcagcatccgatacaaactccaagtcatcaggtgacggcacatcgtcggcaattttttggggaccgcctcgtgtcagtgagccagtcatcgtaaggtcgtccacatagacgcacacgatcagtgtgtgtgtgactccttcagcctcccaccttttcagatacaagcaatgttctttcttgcatctggaaaagcctaaatcttttggaaagcgatttactacttcgtaccaaactatgggggcctgtttcaggccgtacagacgtttctcaagcttacagacaagctcggatccatcccggaatcccattggctgtctcacatagatgctgtcacttagagtacaccatttaggaacgcagtagaaacgtccatttaatggaggtgtagatctaaaactgtagatagtgcgagcaaaagccgcagggactcataccgggctacaggggcaaatactcccttgtagtcaatgccgtacagctgggtgtccccttggactaccaaccgtgctttaaatcggtcaactgtaccatcagaatggtgctttacgtcgaacacccagtgacaaccgagtgctcgtcgcccttctggtagaggcactaacttccatgtgccgttctttagtagggcctcaaactctgtctttattgcgcactcccacggcgcggcatattcgctatcccgcgccttcttaatagatcgcggaaaagggaatgggtttcttaccagttgtcacattatttaactggtgacataatctgtcagtctgacggtacgcttttgaggtgaggcgggtgaacgcctttatcgtccagggtgtatagttacgcgcccaggggttgagcgagtctaaaaggaaaacccaactgggggtcagtctccaattggaatacaagtatcccgaccggagttggcgtgtgaccttgtgtaatccctttcggtagcgtttatcttcggtaggtccggagttcaccacgtgagctgctttcacaatatcaatcagatacagaataatacaaatcaaccacgttcgttcccaaacggagtcagtacggttggggggggggggggggtcaacctattagtggggtcgtccccaaacaccaatcaatacaaacagagagttgtacacgatatacagatatacccttgagcggtgggtcttcggtccagtcaaaaaagcctagttcagaaccctggccagctccaaactcactggcttactcaaatctatatcgcgcaccactcccggggccgaacactagaattcgttccggaagactaaccgattcacacacaggtatacaatcctaccacacagcagtctcacaatcaagttcaaggggtgactactaacaacctcccaaacctcaagttaataatatgaaatgggttaccgttcggttcgccaactggaatatgaaacggcggatcactccttagcgcgcgtcgccgtggtccccaccaattagatctctaggtcgcagtggagactcgcacaacgggcgtacgcgtgcccgaggtgaccttatccgcaagaaacgcgtcgccgggcccggggaatggcttcttgaggcttggtcggccgacttgtcactcacaaggcaaaacgaactctctgttgattttagtgctagacgatctctactagctatctttccacatgcaggattcactttatcttggtttcactatgggtccgggtgtcgtaatcatcttgagcatccggagacacgcaaggaatcaggcgacccctcgtgcaaaacagatcttagtcggtcgcgttggtcggtcgttaacatcttggccagactatacttggagtttggaacctttcttgatgggtgaccactggattttcccctcgcacattcaaggacccatccggatccaaaccagctctccatctcgatccaaatccagaattccatccatccatcctaaacactgctcatcccggcgcctctgcgtcgtcgcttgacctcgatacacgctcggtcggcaacagcaaccacacacatgccttcgggggcatccatgacacacatgatcactctggcgcatgccaactaccgaattcctcgatgagctgtacccccattttttcctcgaaaagctgtatccccaaccgggtttgttatactaagtgatggacagctttcaaggggacttcctcgatgagctgtatccccaggcataatattagccaatgagctcgcttggctctgaattgccaatcccccagtcgacgaagaaccgctaatggtaagtgcggttgaacgtgttgctctgtacaattactgacgtctttggatcgaacaggagggaagtccagcgctacaatcactggagtagatattgtcgggtgtgttgcaggagacgcggggaggagctgcacagtacacgatgtctgtggcaagcatctaaagatcgatgatgtcatcgtctttagaggggtggcagtcatggcagataacggagacgtcgagtgtgctgtgaaggcgtatgtaatccgtttgggagctcaattatgccacgtaggctttttgccccgtcgacttttgaggcagaggacagcttgtaagaaccgatacacccacttccacatagcctttcggctgccacctcgaaaacttggattgattgtaaggtccttcgctatcacctggtttgtagacacagctagctcgtgggatcaccgctcaattatccacgcagccagctccacttctaactcagcgtcctgaatatgggctgcttgcacaccatatttgcgcgcaacaggctttacttggccagccttagcctccagcacgatgagcaacttgtccttggcgcttaggtaccttctccccatgactttcttggagtggcgtgcagcgtgcggcccccaacgattttgaatattttagaccaatgagaagtggttgggtctcaatggatttcctcgatgagctggccccctttggtgatataccacgggggtacagctcatcgaggaattcggtattcgtccttcgcagcgcttcatcactcgtagcagctcaattgtccggagtgcccaatctggatccagacaatgactgtcaatcttcttctgccaccgcgtcccagcttgcacttgtcgcaaaatcaggataggttctggaccaatcaagggcaggctttccgggacaaagtgggaactggcgcaaagggaaattttcctcaagccgcctcgtgacactttctttttatcttagacctccgtctgtcaccactaaccccattttctgctcccactatgtgggatgtcggtggtcgcgtttcagatgctgacgttgaggcttcaacttcggtggtcgcttcaacatcagcctctgttctaggtcgcttacctaaattctgtatgatcttttcctcttccagatatacgctactgtcctcagtagggaacgacctttgtatcattgcctgtgtacttgttgagctaaatttaacgtcgcgacagattaggtacttatttgccttgacgtctagcagccgataccctttatatttgggtgtcagccccaaaagcttacactcgattgctcgatcaccgagtttttttggtctgttcgctttattttgggtacatgtgcatagcatgttgtacccattatgagtgccaagccatttggctgctgatgatgccgtaattcatacggggtcttcatccccagtctggtcattcgtaggcggttggtgatatctacaatatagtttaaggcttcaggccaccacttagccggcatattggcccctttcagtgcacagcgaacaccagccatcatcgtctggtgcgctctttctgcactcccattctcttcttctgactctacatttgaactttgaaagtctaaatcaagcttagaacacaatttagacacctctgaatttagaaattcagaaccaccgtcggttctaattctcttaaccttaaaaggaaattgtactgacaaatgctccatcaagtcacgatttttgctgggaacttctttcagggattttaccacaaagtaccacttataagcagtagcgtcatctacaacggacagggcatagtgatagccaaacgagccatataagtcattcacccgtaattttctagttgagtgtatggagtggctcagtagccttggctcccaccatgttcttataggacatccttctatctttcatttgggcgcatgtcttacaaaagaaatgaaccttcttcagttcagagtaaggtatttttggctgcccagtaatttctcgttacttaatgttcgaattaacctttccttaccaacatgaccgagactcaagtgccattctttcaaaatattaccaaacttacggctttgggcactaaaaatgcccgtcctggctttacattcggtaagtaatatggtcactgctgcaaacagtagcttgaagtcttttcctaagaaaaagagaaaatctccagattttgacagaaagtgcctgtacccttgctttgccaaatagtatgcacttagtaaattaatgccacaattccggtcatatgagatatcgaaagagaggacacgtttgctggatattatgtcctgtgacaatgcttattctgtaggatacagaatacggggttagaggggttaaaccagcttcggtctgaagttatagctctgcctgctcctgtatccacgacccacatatcgtccgtttactttaggttgtttatatactgtaaagaatccgtatgaaatttacgtactatctcttcaacttcgtccatatttggcggcaacggtgactcagccgacttgctgttgtcctgattggccggatccagacttctgaggtcgtccataatttggtcctccagggccctctcgagtgccgtcttgccttctccaaagaggcgcttcttgccgtcggtcacgaccgccgtcatcgtgttaattgcggcgttcttggcctttttcgccccgggggccgttttggtgtcggtccggaacaatggcccaccttcgcagttcgggttccggtcggacgccataacaggacagtcggccttgaagtggccacctttgaaacagtagaaacacgcccgtccctctttttcgtccgcatgcttgcgtttttcaacgtgtttggtcctcacattattgatggggatggacgcacttctgtccatgttatgacaaatctccttcttttacttttcctggaaaatgcgcctcagtgcgctttccacctttcgacagtgaagtcgctctttttcatggggatggacgatgcccaaaactctttcggcaactgggacaggacctccccacatagccacgattcagtgaccatgtcctctcccagaagctcttgcgtctttctgttgatttcattgcgcgctttcttcagctggacgaagaggatgcgaagatcgcgccactggctccgagccaaccttgaccaggctcgggtcaactcaagcagaccagccgcatcgccctgcccatagtctttctcgagggccttcattacctcgcatgggtctaggttcgacactaggtctgaaagagttgacagatacgagttgggtaggacctgatttagcaagttttgcaggtctccgcgacccctttcccagtccatcacgttctaagccatgattttcttctccttgtcggtgaggtcactatcccccgggactgatggcggcttctccgggcttccatggaggaagtcgatcatcaaaacgtggacagggggcagcgccttctcgagttgcttgcgcttgtacaactgatcgaggtgattacagcttatccttccacatagcgaaccgtttgccgttgaaggcctccagaccgccagcgctcttcttctcggtcgtcatcgacgtaggtacttgaaatgttgcgtgcaccaattgtaggtagttgtgtagttgccgtcagtttcggaagtgatggcaataaaagcctgcttccttcacatccctcggcttatcatagctgctcctgcaccaatagtgccctgcccgctttgcggggtaatctttgctgctaccagcatcaaggcccacgctgacaggaggacgtgtttggagcgacggttccctgagctgcggcgacagcgggtgctggcagcacaacaagctaagaaggaatacgaccgaatgtacgcacagaagaagcgggaagcgatagccattctcgcgttgcgagttattggcacctcccctgctatcccgcttcgtgttcgtagtctggctgatgtgcttccaacaccgctgtggcctcccagctccacgtcccaggccatgccccctctccaatctcgacgacgtctacctctacgtcaaccgagagtgcgtcaattcggcaaggaccgcttctgttgccggtgcgtcacaagtccgacgacagcacgaaataatcgacatcactggtgacgaggaagacaacagcatcccgatagaagtctctccatgcccgatttgcctggatccccctacagccccggtaatccccttctcgtgccgccatgccatgtgcagtgagtgcacttccatgcacgtggggcatgcgttggagatggaagaggaggctcagtgtccgttgtgccgcgtcaccctacgattgtagatgtgtatgggcgttgcctaaagagttgttttgggtattaaaaaaatatatgtccgcagaggtttctgcttctgtacaaattgttggttatggcttatactagcgtaggtgattatgattcgatgtgtgtctttgtccgagtcgtaatatgttactttgtgcgactcgtaatagtttactttgaacgagtcgtaatattttacagtgtaagagtcgcaaaactttactttgaacgagtcgtaatattttacattgtaagagtcgttacattttacttaagagtcgcaacattttttttgaacgagtcgtaatattttactttgtccgagtcgtaacattttattttgtacggctgctcgttatattttaattcgtgtacgccgtagtagtttacttgcgaatcgtaacattttacgctgaaccactagtaaagttttactttgtaagttgtcgttatgtcggagtctgggtcaactgatgttcggaagcggagaacaaagtctggaagccactcgcgtcgacatggccaccatcgaagtctttcgtccgtaagttctgatagcgaggacgatcgcagtcaccatcggatttccagaattcgatactcgagaaggtcggaccgacgctctctgtccggacgctcgggtcgatctgttcggtcgcttcggtcggagcctttaatcggatcggggccatcgggtgccacgcagattgccttgaacacaatgaggcaggtgcaggacgcggtgtctcgcatggagaacactcagggctcgacactcgagaagcttggactggcgctaaaggcggaacttggacggatggttcaggaacagctttcggaagctcgaccgatgaaaggtgtcgtcccgagtccccatgacgacagtcggactcgccgcgaggcggagactctggaagcaacggtcaagaaccttcagaagtatctcgtgggacaattgcgcaatcttctgacgacatcggcccaagatcaaggatctgcgggaaaaatccagtctaatccggcaactcaaggatacagacagtccgatcgagtaacttcagaccggaaacccagtcgagaatccagtggcgtaatcaacgagcgtacaagcgcggggcgtatgggacaggacatgaagaacaccgacgaattcctggcgtccaaattgcaggagacgttgaacgcggctaaagcggtgagcttattgaagccccgtgcggcacaagctccgaaggtggttgtctaggaggtgaaggcggaacccgtgctcgagtcgaagtcccctgcgccgacccgatcgacgtcaagtagagtgtctggatggccatcgtctggaacgtccaagtcgcccgagccgcgcaggcgtgagtcgttgcgcaagaggaagtctggcaagtctcgtcgtcatggtaatccgtcggactccggcccgagctcggactctagctctgaatcggactcaagcaacaggtcggacagcagctcgtttggggacacgacgcctggagtgactacgaagactgcagaaggaggcactacggtgtacacgttcaagccgtttgtgaattcgaacacgctggaggactttgatccgaaggcctcgttggcgaccaggattcggtggctggagcggttccaaagtatgactacccagggcggatggacagatcaagtgaaggcgtacgagatgaaactcaagatgcctgcgcctgtttggaactgggaaacaaacttggagctgaaggtgcgtagggactggaaacggtttctgaaggcattgcgcgagaggtactgcaaggccaagacttcagactcggagcggtattacacgatgattcagaagaaatccgagacgcctctcgagttctactaccggttgaacaaggtcgctgaggaggctggtctggacttcaagtcgtcgcgcaaggctcgagaacgccatctgaatgtgtttatgaagaagcttttggacaccagactgcgatcgaccctccaaggccagcggattcggagcctgaaggatgtgaagtatgtgctgaaacaacacgaggacatggctcaggacgatgactacgacactccgcccgtgaagcgagatttccgagccgacaatgtttcgcatggacatttccacccgaagcggaggggaagagcattcgtcgtgcagaacgaagatgagtcgagtgatgatgacaaacaagtgcgtttccatgatgccgtcgaagacattccgaccaaatcagggacgctagcgactgctgcctcaactggaagcgtgtccactggaagctcgatgtctagaaactgatccgctgggattgctacaaccggagcagggatcgaaccggatggagcctggaagcaaggattttctgatgcagtgtttcgagtgatggagcatgctggatgaaggccgccaactccagacttcaaaccggacatgagaactcgatttagcagcccgaacgcgaacaagttctgtgagaactgcaaagacttcggacacaccgcggatagttgctgggccgagattcagtgtgaacgctgccgtcgttttggacatccaacccgaatctgcaagactcaaccccgcatcttctgcaacaagtttcacgaagacaagtgtgatacccggaaggcatttcaaaccgttcagactctggttcgtcaaggctccaccaaagacccgccgactccagtcagagatcaacttttggatggagacgccaattctggggaacagcagttaaactaaaatgcctgctgaatagggattcagaacgcgtagggctcaaggaccccccagaattgtgtgtcttagcgtatgttggactggaactcagacgtcaaacccaaactaaccatcaatgcatgactgagattcaaaacgacgtctcctcttctgatgactcgtttggatcaacctcacccggattcggaacgctcactttctgaagctcgcgacccaagtgatctggttgaatttcgactggagccaggcgagcgatatggatggtgggcaggtaacgaaccggacgaagtcaagaaggtggcaatggtagacggtgcggtgaacaatcggaggacatctaatctttttgggctctggagcatcagtaaacatggtgagtttggaccttgcgcgtaggctcaagctcaagctgaagttctgtaaacagctccgggtctctggattgggtggagttccgacgatcatcactgcacgcactgaagttattcagtcggtgtgcgcttgtgtgttcgagaaggcctggtacaacttccggatgaagaaccagtggtgttgtccgaatatggtttggttccgaaacggcaaggactcgacattccagtcacgcccacgtagacgctctacttaggccccggcgaacatgcgatcgtccggattcgttacggccagagtaacccgcaacgcgaagtggtctgggctggtcgaggccatcgctgggtgaccgagatcatctacacccttcggtcctggccaatcgctgtgaaagtggtcaacatttcggatcagaatcggtggatagattccaggacaccggtcgctcggatcattgagttcggattcttcccgaagtctggacattttgttcgacctggattgaggagataccgagaatggcaaaccctgatctacgagaacacgaagtcggaacaggcccgttgcgaaaggaacggtacaatcagatgctgagagatgctgcccctccatgtgtttcgaagtccgaataccggtggccaactcggttaatgttgaagaaggagctgtcatttggagcttaaacagtgtatcaagtccaggtgcaggaacaacctcaccgtgcgacattcgtcatgaatagtcccgagcatgaagtcccagaagatgcacccttggaagtggatggcacggctagctctcacgatgacgtgcccaggttcgaggtcttgaatgaagacgaagaatttccgcccgaacattcagcctcggatgaggacgagtttttcgatgcgatcagtttcgatgagaattatccggaggaaggtctatcggccgacgcagacatccaggagtcgaagcccgttgaggaagaagatctggatttgccgactcaagcaatgccgagtagtcaagttcagaaactcaagatggagtatgatcgtgtgatgaggatgaacgcagaggaattggattatgagcctgctgtctatatccatgagggcagtgatcttctggctcaactgcgggaccagttgaccatggtcccggaagtgcgtgatctgaatccagagtgcgatatcgggacggttgactttggtgacccggatgtgacctctccagaagaggaacggaaactacggtcagttctgaagtgtcatcggaagatcttccttggagacggaaatgtagcgccagcttcagctcgtggtgtgatttgtgatttggatgtgtgggacgccaagcccgttgctcagcgacctcgctcgattgcacctcaccttgcgatcaaggtgtacgagttgttgaagaagctcctggaaactggtttgattgagacctctcattctccttgggattctccgatcgtcattgttctgaagaagaatggagttgaaatccgaatgtgtattgactaccggattgtgaatggatttatccagttgttgaactatccgcttccgctgatcgacgacctgctgatcggtttcgagagggcaatgtggttcatgagtcatgacatggctagtggatctggctatccggatgtcggaaagagcgaagctgatctccgctttcatctgcccgtacggacacttccaatggatccgcatgccatttggactgaagaacgctccgctcatctaccaggcagtaataaaaacctgtctgtggggtttccttcggttgtcgccagaagaagaagaagaagcagaagtggatcaagatgttctcgactatctcggtctggatcccatggtccgttcggaaactgagcactccaactcggaacgaggtatgccggtgttgactgaagggatgactatcttcaagcggaatattccagctccgcctcagatgggtcctgtcctgggacgcagttcctacattgatgacattgctcatggagcgacgacctgggaccagctgtgtgaagatttaaatgctttgctgtttcgactccgatactggaacatctccgtgagccttccgaaaaacgaatttgggaatcgctcgatcccgtacctctctcacgaaattagtgcagaagggattccaatcccaaagattgcgaaagaagttttggacttgccgtttccgaacactctgatggagatccagtctttccttggcagtttgaactattacacaagttcatcgaagcttttccagtcgttgccgcggttcagtacgagcattcggacgaacaagcccgctacggccggagtctagctggagccaaggaagctttcgagatcctcaagaggaagattgtgtcgactccgctgctaaggcatccggaccgaaaacgaccattcatcatcattccgcacgcgaatcaatgggctgcttgcgcagttttgggtcaaaagtacgatgggctcatccagcctgtccgatacataggccgagttctgaactgtgctgagctgagataccacattgctgagaaggaggtcatcgtgattttgagagtatttcaagtgttccgaacgatcgtcgagcactgcccgataattgtctacacgcgatattccgttctcaagtgggtcatcaactcgaaatcggcagacggaagatgtgttcctttgggacttgcgttgtctcattggaatttggagatccggaaggtgcaaagggacgaagacggactagccgctatcatgggcgcgggtatcacaccacgtgagcttttggacaagatcgccgagtcgctgattccagctaaaggcgagattcggaagcccccgatgagcagtgtcgagctgcgtgcggaggctgcccgtctggaacgtgagcggtctgaggcactgctatgacgtgcatttgagagctggttggtcgcttggcggcgtccaaaacacctatctacgctacgaagctgcgggtgaaatgcacgttggtcgggcagtggctgggctgcctacggaaagctacaagttctcaacacttccgccccacttcaatgtggatgacgaaggtgttcagcaaggtgtccgctttatgttccctggactacccgaagggttaaagttaatcgctgagtattgcttagcctcgctgacttaccatcacgcatacttggtacgtgcaatatcaccgaagcatcccgttctcgaaacgccactatttcaagatccagccctgctgtcatctcttgccgagcgagtgcagtcaggtgacgggagctccgaagctcgcatttgttcaactggcgtgtcgccacacgtgtccattttgtgcgagatgaagtggctgaaggaaaacttggtcggtgccctcaccaaaattgaagcgacacgggtggatacagcgaaggatattattgctgagcttgaaaacgagcgattggtgcgggaactgtaacctacgatgaactcaatgaagctataacggcgtgtgttaaagattgcgccgttgacgagcttctgcagaagctggcagcacctccagagcacctcacagagcagctcgacaacgacttcgagcgcacgcctgcgcatttttggggtgggaagttttgtcgcgtagccgaagatttcaagatacctgactgctctgttcatcatatctgggtgctgtggagatgcggcaataagtccaagcaagagccgccgctgcgcttgctcgacggacgtgatatgccagaccgcaagcttcaaaagcgactgagcgagcttaggtacctgatgacgcacatcgagcgcaagtatacctcgactgtgctgagagcgttgcagtggaccgagaaaccgcacactcgcgaaaacgtcggtgcggccagttgagctgggccaccgtagccaaactgatgcggaaaaaccacaaaacaatttagattagtgtgagttccgccttttcaaatagatatcaagccagcttacgatacacgcattggcaagtctccccatgctctcttcgtgctgttcaagtacacaccacaaccacattaccgtaagattctctaaacaaatcacgatttgctctgtctgccaattgtccgacaatttccgtctaagaatcattcatccagggtcctttttgcgccccaatttagcttaatttacgtaaaccatagaataagtttgggtacctcgaattagtgacatgttactaaatggatgtaaaatcggcgacttttttcaaataatttataaactcgaacacttaataaataagctatgataataaatataaattcaaagaagtcggtgtaccagggatttttaaccgctctagtttacggcttcggaacctaaaaatctggacatataggttttcgtatatgggtaattcagttgtactgctcccaagtgtcagagacgggacaaataaataaaaaaataagatcggagccaattttgagtacgaagacgtgaaaacctgggcgtatgtggtgtcgtgccccgcgatgaagcgggcacgtcgacgccggtgagaggaggcgccgagatggaagccgactgacgcgaaggatggaagtcggcgcggaggatggagcgcgatgcagttggttgaacgcgacgcgattgatgggggccgacgcgcggcagagatcgacgggaaaagtcgacgcggatgatgggccgtgatacacgaccagcgccccgtctctgcaaaacgcgccgaccctaaaccccgccgagcaaaacgcgccgaggtaagatcttgattacgccacgcaaaccaggttgaaggacggcagtgcaagcatgacagaagtagggataggcccagaacggtaggcttagcaagcagtagtagggaatagccagtagcaaggacataggacagggtaaggactcagtcccgaaatttctctgaaccacaaagacctcccgtcttctccgaggttccagaggaaccaccaagcgccggcaagtagagccgcctcgatatcgcgcccccccgtcgtttgctggttcgggtgctcaccccccacagacccgtgctggaacaaaggcacgttaaacgtataccgtttaggtgggcgcccgataacgcgctgcctaggcgaaggaccgcactggcctgataaccgccgtgcacaaggcccccctgtgtaggcccgataacgccacacaagccccaggaaacgccggcctgataacgccgcacgcccgacgggaacgccgaggaaacgccgacccgataacgccgcacgcccgaggctcgacgccctacgacaaggaacaagcgtcaacacaagaaccccccaactctgaagcctgtgaagacttgggcctgtatttcgaagatacgctactccaacaaccgggaataattcgctcggcccgaccgctatccagacgcgccgagtttgtgcgaaatcgcattcgcgagatttctgcgagggcgcttctccacaacggtgccgcgcccgggattactacttgaaatgacgagctaacgatccaagaggcatcggaggcaggtgcgccgtcggccggaaggtcgccgactgcaagagagcacagtgagagacctgtcgtgtcgtggagctctgagggaaccttcacgacaggtcatggggccagcgacgaccaggagggctacgaagaacagtttgccgttcccgatgtggctcccgacgagggagccgcgaagggccgcgacgcaagtcgcggtccaactggtcggaagcctgcaaaggtcaacgaccaacaacaaaccaccgccaaggccgcaaccacgcgcaagtcgcctaagaggaggaagaagaagctgcgcgcgccggactcggcggatgagtcgctatccaagccgcaaggcaaggactcgggacgccagtacaccgtcgaggaagtgcggtacgtcgtggcgcgtacggagctcttccgcctgctagagcaagacccaatcttggacttcctcaagcccacgatgatgagcaacttcacaggccccttcgtggcgccggacttcgatagtctcaccagcgtcgcccacgccgcgccgactctcttccatatgctttgtgactcgggattcatgttgggggcttttgatatggagaggctgtgcgactgggacctcaagtcttcgttgcgcgcgattcgcgtcgttcaggagcccttgacgattctcgccggatccgtcaaacaagacgcgctgagtttctcgacgggctcagcccagacttcgacgaccacgccctcgcctccacctcgataccaatcgagcgtggacttcaacagcagcttcgagtcgcgcaaacacaagtctccggagaagctctgcgcgccggattcagcggatgaaccgccggtcaaggcgagaggcgacgacacggggagtcagttcaccacggcggagatgaggtatatgcttgctggagtggagctgatccggctgctggagcacgatccgatcctgcgtttcatcaagcccaacgcgatcaagttcacggaccccttccggatgccggactttgacaggctcacgaacgtcacgcgagccgcgtggacactcttcgagatgttgcacgaatcaggcttcagcttgggtacaccgagagggcgggagtgtatgactgggacctcgagtcgtggacacgtacgatccgcggcgtcttgggaccgttgacggtcctggtcggatccatccaacgcaagttgactccgcctgggacgggcccaatctcgacgcagaagataacttcgtcccagtctgagtcgagcgtgcatttcacgtcgaggtccaaaccccgacgtgacgtagatgacgaacccgccgacttgtttgacgtggactttgggatgccgataaccacggccgcgatctcaaccacgacgtcaccggaactggacgaggtttctatccatctgagtgagccgccgcgcgctacgccccgtgaggtcgcgttagtgcgtatcacggttctgggcctcgacggctcccgcactcgcgttacgacgcacgagtgcgacctgtctcactcgacgcgctcaagcaactcgacccagggcgaacactcgacgtccgcctgcgttccagccgggatgcaccgcgcctgtgggtcacgcgcagcaaaacgtgggttacaaccatgtttaagactaagatcgagcgacaaacatacctgcgggtgaccaacataacggacgagacagtaacgctcgacgcaggcatgacagtgggctggtggacacccttcgatgcgtttccgcctgcgccccgcttcgtactggcggctaatcgacattaccgagattggcaaagcctggcgtaagaagggacctgggacgaggacgaaacctggcgggatgacgaactcgtctggccaatgtatggatgtccgacatacgaagatttgggatacgacgcgcgtcgaggtgagcaaaaggagaaatattgtgcgggtagtgagccgagatcgtacccaggagctgccgcgaactcaccgccagcaggaccgacatgttcgtctgaatctgaggcgtcgccggacagcaagtcgccgaagtacggcccctcgacgcggttgcgcgagataacgatggaaatagccgtcgtgaggacgacgtgcgtacggccggaccaagggtcgcagagaagcgactttgcgggacgcccagctgaagcgcctggaaccgaacaacccgccgaagattcgtcgggcgacgcggcccaaagcttgcaattctatggtagatcgcggcaatgtgacgagatgcgacagccggacgaagggccgcaccttgagaaattcggtggcgatgagtcgcagaagtgcgacagtgtgagacgggaggaatggaacgtcccagaaccatcccaggagcagtcccagaagtgcgacaccgtgatacggaccgaatgttacaccgtgcgacagtcgagggaggggtcgcggggagagactgaccgaatacgatactatgcgacagtcagtagcgaagtctcagagctgcgacagtatgcgacctgcggagaaagctggaaaatggcgtctttggagacattccgccctcgagcccgtgaagaacaagccgaatgtgaacttcgacgtggtcgacgaggagcctgacggtggcgggagtggatgaccaccgaggcctgcgccgaaaggggggcaccgcgccacaaccctcgatcgattggtcaacccagagcgagatgctggtgatctaccgaagtggctggtacgctgcggcggggcaagtggtgcgatttccggctgacaagctcgaatgccacggcgcgccacctggaggattgctggcgaaggtaccagctgtccctcgacggatgtccagcgaattcaagaagtcgacggtcctgaagatggcgggcaaggcgggcgacgagccgcgcagcctgcagctacaccgacttcgaatctgtgacgcactacaagtgcaaccgcattacggcgtacgttgaggcgggaacacggggcccgacgcagttgttggaagcgtacgacgagatcaagaagacagcgcgacgaataactcgtcccagacccggtgcgcggagacgatgcaccaccgagaggtcaccggggaacgtggtcaacgctccgcgatggccggttgcgctggcgcgatgcgcagggcgatggacggtgccgactcggtgaagactcaggtggaggccatccagtttactgcatgcagaacgcgtcgagcccaagcgcgacgaggatgtcagatccacgttgcacgacggacagtcgcgccgacgcgagacgcgggacgagcgacggtgatgccaacgcagcaaaggcgcaagtggtggtcataccgccggcggatcgctcgggagaaggcatccgacaccggacgttagatcaagaaacggcgtcacctgacatactcatcgcggaagaatgcgacgcggaaaaactcgacgtggaaaatctcgacgcgaaacgcgacgcgaaaaatcgcgaccagagaaactgcgacgaggccaaccctgtcgcccacgtgccggaacgagacccgccgacgccggagaacatggatttggggcgcgggacggcaaacatcctcgcggtgacgatgcactcggcgtctacacgcgcgacgaaccgcagaggcagagctccaggtgtcctacaagagccggctgctcagaacccgtcgagcctggccaagacccctcccaaagcggctaaaggcgcagagagtcatggcccggggcattttacggggcgcggtgcgctggacgaagacgcgtcttgcgtcggatctggttgtgcagtcaaagttttgggtggcgtgtgggtcgcaacgagaaacacgtcacgcgacggtgcccagtcaaagcgcctagggctatgcgttcgacagcgccgccgactcgcgcaggtgaacgcactagaaggcggccaagccggggacgacggagatcggacccgaggcgacgtcgcggcgacgaacacggccggagtgaattcgttgatgtggtattgcttggaacgcggcggaatgcgatctgcccgcgggctagagctcaggctcgacgctgtatcgcggggcgccacgttggtgagcacatacgccgtacgtcttgagacgggcggtacgcctcgtccgtattcggccaaggacgtatccaagctgaatcctgtccgcgctacgatcaatgggacgactccgttgaacgagccctccgacttccgcgacgaggtgccgctgaaagtgaacagggacgtatgcgcggtgaagtgcgacgagatgccgctagaagtgagccgggacgctagcgctgtgaagagcgacggcgttgcgtagtcgaagttcagggaaaagcacgccaagacggttggcgtcgtgatggacctggcgccctcgtttcggctcgcgcgcgaccgagatccgcggtatacatcaagggcgataatcgccgtcggaaaacggccggatcagtgcgccgagcccaagcaatgggcgctacagatcggaccgcgtgcgcagatgcggtgcgtcatgttgtgcggcaaagcccagggcagcccaaacgagtcgcttcgcgagacgagtagctcgcttcacccgctggctttcgacgtccgcatctccaagcgaaaccccgttgagaagtttccgtcacacgccgcactgtctttggcggtgtcaacaaacggaccgttttacttagtcgatacgtgtttaccggagcacagcccgacacgcgcagcggacgaggatgcatccgaaggggagaagaccttggagctgcatgccggccgagcttcccgacatggatgcgcgcgccgcgagtccgacgtgacctggagaggctttaccgacgaattagatgccaactgcggaaagtggcgatgcgacgtctcacgtcagcgaatcggccgttatcgtcttggggcgatctattcgcgcgacgacgagaggcggctgagcagagccctggtggatgagcgcctttagtggtgcggtggaggttggcagggtggctgccgacaggtggataggtggaaatcctcgactctgggaatggccggagcgaggggttggatgagggaagtgtggaggatcagcctgttgctgaagatgggacggtggagggccgtctcttaaaagatgtgaagaagggggaagaaacgaaggaaaagaacaagaaccacgtgttggagttacggctacaacgaggggacgcttggtctgagggcggcacgcttgggcgtcgctgtccgaggccttggacttgaactgcgctgtgacttgacccgctcgatcgacagcagcagccgaatgcgacgcgactgcaagccttggacggctgcgctgtccgaagcggtcgtgtcggccgctgtcaggtcgccgactgtgccgccgagacgaaggcgaagacgatggagtcgagaccgaactgggggcctgcacgcttgacgcgttgattctccggctccgctgtaccgaggtcgtcggactgttggcggtggagtagatgccggacctggacgaagcgtcggacttggatggtgcgtcggaacccgatgagtacccgcgaataacgaggtattagcctcaggaccgaaaacggtggcggcaggacgaacgctggcacccgtactcgacgtagtggaggcgagacacaagcagcgggagccgccgctcggcttgactccacaggccacagtgttcatctccaccgcgacggatgcttcaagtcgactgatcagatcgtagatgtcgatgtacccgcctaaggacgtgacgacaccggcaagacgttctggaaagccattgcgcacgtgctacgccatctaccaacctcgacgcgcttcccgaagcacccgtcctcaaaccgcgacatgctcgtcgcggtcctggatggccacgtcgcgctcgtcttccagctcgattacgtgagcgctgggacggtggacttaagcgttcgcagcctctcgccgctacccccacacgcaacgtattcccagccgcgccgagcgatattgcgccgcgcgagacgtggcctgaaactcgccgattcctccaagtcgcggatacgcgtcgcgccccgccggagttcttctacataggtcacaaggagcccgttattgcgccgtaggtctacttagagcggctctttaaacgctgcgccgactcggcttccgcacggctctgcgtgagcgcattacgaacaagggtgagatgctcaacaagcgtagtgcatcgccgcacgagcgcgacggacctggtctctctcggtgacggaggtgttgcactcctctttggagagccgaagcttgacgcacttggtccctcgcaacgctgggagcgtcgcgcgcttgatcgacgaccaccagggcttgacgcgcgcggtcgcgctcggcgaaagctacgccgcgttgctgttccgcagctacgaaggattgctgcgcttgatcacattccgccacggcagcgccgagtcgcgattggaccgcggagaggcagtttgggctaccgcgagctgatcggacgcgagaccgatgtgctctgcttgcatagacgacgatgtcggcagccttgaggtctcaggcccgccctcctcgacgtagatgtcctcagcgcgaaccatgatacttgaaaggcgacgaggcggacggcgacgacaaaaatgcaacgaatggagatgcggccacagcgcggggcaggttctgcaacgacacacgcacctggggagtgtgcgtgcgtggcagcgggacggttgtggtgtcgtgccccgcgatgaagcgggcacgtcgacgccggtgagaggaggcgccgagatggaagccgactgacgcgaaggatggaagtcggcgcggaggatggagcgcgatgcagttggttgagcgcgacgcgattgatggggggcgacgcgcggtagagatcgacgggaaaagtcgacgcggatgatgggccgtgatacacgaccagcgccccgtctctgcaaaacgcgccgaccctaaaccccgccgagcaaaacgcgccgaggtaagatcttgattacgccacgcaaaccaggttgaaggacggcagtgcaagcatgacagaagtagggataggcccagaacggtaggcttagcaagcagtagtagggaatagccagtagcaaggacataggacagggtaaggactcagtcccgaaatttctctgaaccacaaagacctcccgtcttctccgaggttccagaggaaccaccaagcgccggcaagtagagccgcctcgatatcgcgcccccccgtcgtttgctggttcgggtgctcaccccccacagacccgtgctggaacaaaggcacgttaaacgtataccgtttaggtgggcgcccgataacgcgctgcctaggcgaaggaccgcactggcctgataaccgccgtgcacaaggcccccctgtgtaggcccgataacgccacacaagccccaggaaacgccggcctgataacgccgcacgcccgacgggaacgccgaggaaacgccgacccgataacgccgcacgcccgaggctcgacgccctacgacaaggaacaagcgtcaacacaagaaccccccaactctgaagcctgtgaagact
